United States Patent Application Publication US 2025/0057892 A1 - sequence listing, part 5

SEQ ID NO: 4256 - DNA, 5360 bp, Homo sapiens
  source 1..5360: mol_type = genomic DNA
cacggcgacggcggcggtggcggcagttcctgctctaggctgcgagcggctggcggcttcgaggggagctgaggcgcggaggggctcggcggcagcggcggcggctcggcactgttacctctcggtccggctggcgccggggcgcgcggtttggtcctttccgggcgcgcgggggcgacagcggcagcgacccgaggcctgcggcctaggcctcagcgcggcggcgggctcgagtgcagcgcggaaccggcccgagggccctacccggaggcaccatgagcgtggaggcgtacgggcccagctcgcagactctcactttcctggacacggaggaggccgagctgcttggcgccgacacacagggctccgagttcgagttcaccgactttactcttcctagccagacgcagacgccccccggcggccccggcggcccgggcggtggcggcgcgggaggcccgggcggcgcgggcgcgggcgctgcggcgggacagctcgacgcgcaggttgggcccgaaggcatcctgcagaacggggctgtggacgacagtgtagccaagaccagccagttgttggctgagttgaacttcgaggaagatgaagaagacacctattacacgaaggacctccccatacacgcctgcagttactgtggaatacacgatcctgcctgcgtggtttactgtaataccagcaagaagtggttctgcaacggacgtggaaatacttctggcagccacattgtaaatcaccttgtgagggcaaaatgcaaagaggtgaccctgcacaaggacgggcccctgggggagacagtcctggagtgctacaactgcggctgtcgcaacgtcttcctcctcggcttcatcccggccaaagctgactcagtggtggtgctgctgtgcaggcagccctgtgccagccagagcagcctcaaggacatcaactgggacagctcgcagtggcagccgctgatccaggaccgctgcttcctgtcctggctggtcaagatcccctccgagcaggagcagctgcgggcacgccagatcacggcacagcagatcaacaagctggaggagctgtggaaggaaaacccttctgccacgctggaggacctggagaagccgggggtggacgaggagccgcagcatgtcctcctgcggtacgaggacgcctaccagtaccagaacatattcgggcccctggtcaagctggaggccgactacgacaagaagctgaaggagtcccagactcaagataacatcactgtcaggtgggacctgggccttaacaagaagagaatcgcctacttcactttgcccaagactgactctgacatgcggctcatgcagggggatgagatatgcctgcggtacaaaggggaccttgcgcccctgtggaaagggatcggccacgtcatcaaggtccctgataattatggcgatgagatcgccattgagctgcggagcagcgtgggtgcacctgtggaggtgactcacaacttccaggtggattttgtgtggaagtcgacctcctttgacaggatgcagagcgcattgaaaacgtttgccgtggatgagacctcggtgtctggctacatctaccacaagctgttgggccacgaggtggaggacgtaatcatcaagtgccagctgcccaagcgcttcacggcgcagggcctccccgacctcaaccactcccaggtttatgccgtgaagactgtgctgcaaagaccactgagcctgatccagggcccgccaggcacggggaagacggtgacgtcggccaccatcgtctaccacctggcccggcaaggcaacgggccggtgctggtgtgtgctccgagcaacatcgccgtggaccagctaacggagaagatccaccagacggggctaaaggtcgtgcgcctctgcgccaagagccgtgaggccatcgactccccggtgtcttttctggccctgcacaaccagatcaggaacatggacagcatgcctgagctgcagaagctgcagcagctgaaagacgagactggggagctgtcgtctgccgacgagaagcggtaccgggccttgaagcgcaccgcagagagagagctgctgatgaacgcagatgtcatctgctgcacatgtgtgggcgccggtgacccgaggctggccaagatgcagttccgctccattttaatcgacgaaagcacccaggccaccgagccggagtgcatggttcccgtggtcctcggggccaagcagctgatccttgtaggcgaccactgccagctgggcccagtggtgatgtgcaagaaggcggccaaggccgggctgtcacagtcgctcttcgagcgcctggtggtgctgggcatccggcccatccgcctgcaggtccagtaccggatgcaccctgcactcagcgccttcccatccaacatcttctacgagggctccctccagaatggtgtcactgcagcggatcgtgtgaagaagggatttgacttccagtggccccaacccgataaaccgatgttcttctacgtgacccagggccaagaggagattgccagctcgggcacctcctacctgaacaggaccgaggctgcgaacgtggagaagatcaccacgaagttgctgaaggcaggcgccaagccggaccagattggcatcatcacgccctacgagggccagcgctcctacctggtgcagtacatgcagttcagcggctccctgcacaccaagctctaccaggaggtggagatcgccagtgtggacgcctttcagggacgcgagaaggacttcatcatcctgtcctgtgtgcgggccaacgagcaccaaggcattggctttttaaatgaccccaggcgtctgaacgtggccctgaccagagcaaggtatggcgtcatcattgtgggcaacccgaaggcactatcaaagcagccgctctggaaccacctgctgaactactataaggagcagaaggtgctggtggaggggccgctcaacaacctgcgtgagagcctcatgcagttcagcaagccacggaagctggtcaacactatcaacccgggagcccgcttcatgaccacagccatgtatgatgcccgggaggccatcatcccaggctccgtctatgatcggagcagccagggccggccttccagcatgtacttccagacccatgaccagattggcatgatcagtgccggccctagccacgtggctgccatgaacattcccatccccttcaacctggtcatgccacccatgccaccgcctggctattttggacaagccaacgggcctgctgcagggcgaggcaccccgaaaggcaagactggtcgtgggggacgccagaagaaccgctttgggcttcctggacccagccagactaacctccccaacagccaagccagccaggatgtggcgtcacagcccttctctcagggcgccctgacgcagggctacatctccatgagccagccttcccagatgagccagcccggcctctcccagccggagctgtcccaggacagttaccttggtgacgagtttaaatcacaaatcgacgtggcgctctcacaggactccacgtaccagggagagcgggcttaccagcatggcggggtgacggggctgtcccagtattaaaaggtggcggcggaagagctaagcaacgtggcttagtccatcagcatcttattctgggtaataaaaaataaaaataaacggatacctgttttccactgctaaaactgaagcaccactgtgtgagcaacaggaagggagagcgcacgagggagaggagccgaggccgagcgccccctgctggcccgcggcggcgaggagcagagggagcggaggaggggccggcccgcgggagccgcggccaccaggaggccccgctccgtcccatcggggctgcggccagggcggagggaggaagaccctcatctcagagtagccctttcctctgttcttttatttctttttctctttgattgaaaggggactacgtcttagcaggaaaaaaaacttcgcatttctgtgcccgagcaggctccttgcaaagacagcagcgtgcggggcagagccccgggagggcgcgtctgtccacgcctaccggacgcgccgaggtcgcgctgcctgtgttctccgagggccttcatttaaagaaaataagggtgttttgggtttttctctttgtttttttcaagattcttttaaaggagtactgaagaatactttcctaagtttgtctgtaaaatcttagcggtggacctgggagatttgagaagcttccagaaacagtttaaacaagccagcgctactggagaagaggagcaacacctgtgccgcggccggaggagttttgttgttggttttagcttccagtggcttctttctgcggggcatcaggctgctggggtagccgcccgccgagcctggaagctgctcgttctccgctggactcagaagccaagctgcttcccgcctagactcggcgcagggccccgcaccggtgaggaaggtgcttttggccccattgcgaggggccttggccaggactggccctgtggccaggaggcgagaaggtggctgttcccggattgacggctttttcccgggggcctttggaagatttggtggaaggacaagagggcctgtccctgtccccgtccccaggaggtaccgacagtccctgtgctggttagacacggagcgctgcacaccgaaagcccaaattgggagctctgcctgccggcaactttgctgatggggtgattgctgcttctggggggtaaggaaacaagttacagaaattaccgcgttctgtgtgaagggactgagggtgtggtgtcattggcagagggtcattttaggagagctgccccagcccctcgaacgcctggcttggggtgtcattctgcctggcggccaggcctccagcttcccctgccccgggcctggggctgtcactggccctgatccgaacacctccagattccggcttctacatgggacagacggggacgcacaggccaccttccttctggcagggactcttatttattcccattgctctagggctttcggtttccccttcttccggtaggccgcgtagaggcatgcaccgggtaggtttccgcggtgaccccgcggcggcctgagggacgctccctgccccatcccggctgttgggctgggccgctttgcctctgcttcgccctgtgctgtgttctccagctttgtagcagcagccttgacaaacccaggcgcactgtaccaaggcaatgtaacttttgattttcggtcaatttaagttcttttgtcaccaaatattaataaacagttttgacttcaaaaaaaaaaaaaaaa

SEQ ID NO: 4257 - DNA, 2915 bp, Homo sapiens
  source 1..2915: mol_type = genomic DNA
agaggcgctgagtcagggcgctgttgagctcgggcaggcccggatggggcggggttagcgcctgcgctctggacggctttggggcagggcagatttatatctgcgggggatcagctgacgctccgcattgcagactgcggagtcagacggcgctatgtacgccctcttcctcctggccagcctcctgggcgcggctctagccggcccggtccttggactgaaagaatgcaccaggggctcggcagtgtggtgccagaatgtgaagacggcgtccgactgcggggcagtgaagcactgcctgcagaccgtttggaacaagccaacagtgaaatcccttccctgcgacatatgcaaagacgttgtcaccgcagctggtgatatgctgaaggacaatgccactgaggaggagatccttgtttacttggagaagacctgtgactggcttccgaaaccgaacatgtctgcttcatgcaaggagatagtggactcctacctccctgtcatcctggacatcattaaaggagaaatgagccgtcctggggaggtgtgctctgctctcaacctctgcgagtctctccagaagcacctagcagagctgaatcaccagaagcagctggagtccaataagatcccagagctggacatgactgaggtggtggcccccttcatggccaacatccctctcctcctctaccctcaggacggcccccgcagcaagccccagccaaaggataatggggacgtttgccaggactgcattcagatggtgactgacatccagactgctgtacggaccaactccacctttgtccaggccttggtggaacatgtcaaggaggagtgtgaccgcctgggccctggcatggccgacatatgcaagaactatatcagccagtattctgaaattgctatccagatgatgatgcacatgcaggatcagcaacccaaggagatctgtgcgctggttgggttctgtgatgaggtgaaagagatgcccatgcagactctggtccccgccaaagtggcctccaagaatgtcatccctgccctggaactggtggagcccattaagaagcacgaggtcccagcaaagtctgatgtttactgtgaggtgtgtgaattcctggtgaaggaggtgaccaagctgattgacaacaacaagactgagaaagaaatactcgacgcttttgacaaaatgtgctcgaagctgccgaagtccctgtcggaagagtgccaggaggtggtggacacgtacggcagctccatcctgtccatcctgctggaggaggtcagccctgagctggtgtgcagcatgctgcacctctgctctggcacgcggctgcctgcactgaccgttcacgtgactcagccaaaggacggtggcttctgcgaagtgtgcaagaagctggtgggttatttggatcgcaacctggagaaaaacagcaccaagcaggagatcctggctgctcttgagaaaggctgcagcttcctgccagacccttaccagaagcagtgtgatcagtttgtggcagagtacgagcccgtgctgatcgagatcctggtggaggtgatggatccttccttcgtgtgcttgaaaattggagcctgcccctcggcccataagcccttgttgggaactgagaagtgtatatggggcccaagctactggtgccagaacacagagacagcagcccagtgcaatgctgtcgagcattgcaaacgccatgtgtggaactaggaggaggaatattccatcttggcagaaaccacagcattggtttttttctacttgtgtgtctgggggaatgaacgcacagatctgtttgactttgttataaaaatagggctcccccacctcccccatttctgtgtcctttattgtagcattgctgtctgcaagggagcccctagcccctggcagacatagctgcttcagtgccccttttctctctgctagatggatgttgatgcactggaggtcttttagcctgcccttgcatggcgcctgctggaggaggagagagctctgctggcatgagccacagtttcttgactggaggccatcaaccctcttggttgaggccttgttctgagccctgacatgtgcttgggcactggtgggcctgggcttctgaggtggcctcctgccctgatcagggaccctccccgctttcctgggcctctcagttgaacaaagcagcaaaacaaaggcagttttatatgaaagattagaagcctggaataatcaggctttttaaatgatgtaattcccactgtaatagcatagggattttggaagcagctgctggtggcttgggacatcagtggggccaagggttctctgtccctggttcaactgtgatttggctttcccgtgtctttcctggtgatgccttgtttggggttctgtgggtttgggtgggaagagggccatctgcctgaatgtaacctgctagctctccgaaggccctgcgggcctggcttgtgtgagcgtgtggacagtggtggccgcgctgtgcctgctcgtgttgcctacatgtccctggctgttgaggcgctgcttcagcctgcacccctcccttgtctcatagatgctccttttgaccttttcaaataaatatggatggcgagctcctaggcctctggcttcctggtagagggcggcatgccgaagggtctgctgggtgtggattggatgctggggtgtgggggttggaagctgtctgtggcccacttgggcacccacgcttctgtccacttctggttgccaggagacagcaagcaaagccagcaggacatgaagttgctattaaatggacttcgtgatttttgttttgcactaaagtttctgtgatttaacaataaaattctgttagccagatctgggcctaatgttaaaaaaaaaaaaaaaaaaa

SEQ ID NO: 4258 - DNA, 2912 bp, Homo sapiens
  source 1..2912: mol_type = genomic DNA
agaggcgctgagtcagggcgctgttgagctcgggcaggcccggatggggcggggttagcgcctgcgctctggacggctttggggcagggcagatttatatctgcgggggatcagctgacgctccgcattgcagactgcggagtcagacggcgctatgtacgccctcttcctcctggccagcctcctgggcgcggctctagccggcccggtccttggactgaaagaatgcaccaggggctcggcagtgtggtgccagaatgtgaagacggcgtccgactgcggggcagtgaagcactgcctgcagaccgtttggaacaagccaacagtgaaatcccttccctgcgacatatgcaaagacgttgtcaccgcagctggtgatatgctgaaggacaatgccactgaggaggagatccttgtttacttggagaagacctgtgactggcttccgaaaccgaacatgtctgcttcatgcaaggagatagtggactcctacctccctgtcatcctggacatcattaaaggagaaatgagccgtcctggggaggtgtgctctgctctcaacctctgcgagtctctccagaagcacctagcagagctgaatcaccagaagcagctggagtccaataagatcccagagctggacatgactgaggtggtggcccccttcatggccaacatccctctcctcctctaccctcaggacggcccccgcagcaagccccagccaaaggataatggggacgtttgccaggactgcattcagatggtgactgacatccagactgctgtacggaccaactccacctttgtccaggccttggtggaacatgtcaaggaggagtgtgaccgcctgggccctggcatggccgacatatgcaagaactatatcagccagtattctgaaattgctatccagatgatgatgcacatggatcagcaacccaaggagatctgtgcgctggttgggttctgtgatgaggtgaaagagatgcccatgcagactctggtccccgccaaagtggcctccaagaatgtcatccctgccctggaactggtggagcccattaagaagcacgaggtcccagcaaagtctgatgtttactgtgaggtgtgtgaattcctggtgaaggaggtgaccaagctgattgacaacaacaagactgagaaagaaatactcgacgcttttgacaaaatgtgctcgaagctgccgaagtccctgtcggaagagtgccaggaggtggtggacacgtacggcagctccatcctgtccatcctgctggaggaggtcagccctgagctggtgtgcagcatgctgcacctctgctctggcacgcggctgcctgcactgaccgttcacgtgactcagccaaaggacggtggcttctgcgaagtgtgcaagaagctggtgggttatttggatcgcaacctggagaaaaacagcaccaagcaggagatcctggctgctcttgagaaaggctgcagcttcctgccagacccttaccagaagcagtgtgatcagtttgtggcagagtacgagcccgtgctgatcgagatcctggtggaggtgatggatccttccttcgtgtgcttgaaaattggagcctgcccctcggcccataagcccttgttgggaactgagaagtgtatatggggcccaagctactggtgccagaacacagagacagcagcccagtgcaatgctgtcgagcattgcaaacgccatgtgtggaactaggaggaggaatattccatcttggcagaaaccacagcattggtttttttctacttgtgtgtctgggggaatgaacgcacagatctgtttgactttgttataaaaatagggctcccccacctcccccatttctgtgtcctttattgtagcattgctgtctgcaagggagcccctagcccctggcagacatagctgcttcagtgccccttttctctctgctagatggatgttgatgcactggaggtcttttagcctgcccttgcatggcgcctgctggaggaggagagagctctgctggcatgagccacagtttcttgactggaggccatcaaccctcttggttgaggccttgttctgagccctgacatgtgcttgggcactggtgggcctgggcttctgaggtggcctcctgccctgatcagggaccctccccgctttcctgggcctctcagttgaacaaagcagcaaaacaaaggcagttttatatgaaagattagaagcctggaataatcaggctttttaaatgatgtaattcccactgtaatagcatagggattttggaagcagctgctggtggcttgggacatcagtggggccaagggttctctgtccctggttcaactgtgatttggctttcccgtgtctttcctggtgatgccttgtttggggttctgtgggtttgggtgggaagagggccatctgcctgaatgtaacctgctagctctccgaaggccctgcgggcctggcttgtgtgagcgtgtggacagtggtggccgcgctgtgcctgctcgtgttgcctacatgtccctggctgttgaggcgctgcttcagcctgcacccctcccttgtctcatagatgctccttttgaccttttcaaataaatatggatggcgagctcctaggcctctggcttcctggtagagggcggcatgccgaagggtctgctgggtgtggattggatgctggggtgtgggggttggaagctgtctgtggcccacttgggcacccacgcttctgtccacttctggttgccaggagacagcaagcaaagccagcaggacatgaagttgctattaaatggacttcgtgatttttgttttgcactaaagtttctgtgatttaacaataaaattctgttagccagatctgggcctaatgttaaaaaaaaaaaaaaaaaaa

SEQ ID NO: 4259 - DNA, 2906 bp, Homo sapiens
  source 1..2906: mol_type = genomic DNA
agaggcgctgagtcagggcgctgttgagctcgggcaggcccggatggggcggggttagcgcctgcgctctggacggctttggggcagggcagatttatatctgcgggggatcagctgacgctccgcattgcagactgcggagtcagacggcgctatgtacgccctcttcctcctggccagcctcctgggcgcggctctagccggcccggtccttggactgaaagaatgcaccaggggctcggcagtgtggtgccagaatgtgaagacggcgtccgactgcggggcagtgaagcactgcctgcagaccgtttggaacaagccaacagtgaaatcccttccctgcgacatatgcaaagacgttgtcaccgcagctggtgatatgctgaaggacaatgccactgaggaggagatccttgtttacttggagaagacctgtgactggcttccgaaaccgaacatgtctgcttcatgcaaggagatagtggactcctacctccctgtcatcctggacatcattaaaggagaaatgagccgtcctggggaggtgtgctctgctctcaacctctgcgagtctctccagaagcacctagcagagctgaatcaccagaagcagctggagtccaataagatcccagagctggacatgactgaggtggtggcccccttcatggccaacatccctctcctcctctaccctcaggacggcccccgcagcaagccccagccaaaggataatggggacgtttgccaggactgcattcagatggtgactgacatccagactgctgtacggaccaactccacctttgtccaggccttggtggaacatgtcaaggaggagtgtgaccgcctgggccctggcatggccgacatatgcaagaactatatcagccagtattctgaaattgctatccagatgatgatgcacatgcaacccaaggagatctgtgcgctggttgggttctgtgatgaggtgaaagagatgcccatgcagactctggtccccgccaaagtggcctccaagaatgtcatccctgccctggaactggtggagcccattaagaagcacgaggtcccagcaaagtctgatgtttactgtgaggtgtgtgaattcctggtgaaggaggtgaccaagctgattgacaacaacaagactgagaaagaaatactcgacgcttttgacaaaatgtgctcgaagctgccgaagtccctgtcggaagagtgccaggaggtggtggacacgtacggcagctccatcctgtccatcctgctggaggaggtcagccctgagctggtgtgcagcatgctgcacctctgctctggcacgcggctgcctgcactgaccgttcacgtgactcagccaaaggacggtggcttctgcgaagtgtgcaagaagctggtgggttatttggatcgcaacctggagaaaaacagcaccaagcaggagatcctggctgctcttgagaaaggctgcagcttcctgccagacccttaccagaagcagtgtgatcagtttgtggcagagtacgagcccgtgctgatcgagatcctggtggaggtgatggatccttccttcgtgtgcttgaaaattggagcctgcccctcggcccataagcccttgttgggaactgagaagtgtatatggggcccaagctactggtgccagaacacagagacagcagcccagtgcaatgctgtcgagcattgcaaacgccatgtgtggaactaggaggaggaatattccatcttggcagaaaccacagcattggtttttttctacttgtgtgtctgggggaatgaacgcacagatctgtttgactttgttataaaaatagggctcccccacctcccccatttctgtgtcctttattgtagcattgctgtctgcaagggagcccctagcccctggcagacatagctgcttcagtgccccttttctctctgctagatggatgttgatgcactggaggtcttttagcctgcccttgcatggcgcctgctggaggaggagagagctctgctggcatgagccacagtttcttgactggaggccatcaaccctcttggttgaggccttgttctgagccctgacatgtgcttgggcactggtgggcctgggcttctgaggtggcctcctgccctgatcagggaccctccccgctttcctgggcctctcagttgaacaaagcagcaaaacaaaggcagttttatatgaaagattagaagcctggaataatcaggctttttaaatgatgtaattcccactgtaatagcatagggattttggaagcagctgctggtggcttgggacatcagtggggccaagggttctctgtccctggttcaactgtgatttggctttcccgtgtctttcctggtgatgccttgtttggggttctgtgggtttgggtgggaagagggccatctgcctgaatgtaacctgctagctctccgaaggccctgcgggcctggcttgtgtgagcgtgtggacagtggtggccgcgctgtgcctgctcgtgttgcctacatgtccctggctgttgaggcgctgcttcagcctgcacccctcccttgtctcatagatgctccttttgaccttttcaaataaatatggatggcgagctcctaggcctctggcttcctggtagagggcggcatgccgaagggtctgctgggtgtggattggatgctggggtgtgggggttggaagctgtctgtggcccacttgggcacccacgcttctgtccacttctggttgccaggagacagcaagcaaagccagcaggacatgaagttgctattaaatggacttcgtgatttttgttttgcactaaagtttctgtgatttaacaataaaattctgttagccagatctgggcctaatgttaaaaaaaaaaaaaaaaaaa

SEQ ID NO: 4260 - DNA, 1556 bp, Homo sapiens
  source 1..1556: mol_type = genomic DNA
acttgtttcactttgtttttggacatagctgagccatgtacttcaaacagaaggcagccaattactaacttctggttgctaggtgtggcttcctttaaaatcctataaaatcagaagcccaagtctccactgccagtgtgaaatcttcagagaagaatttctctttagttctttgcaagaaggtagagataaagacactttttcaaaaatggcaatggtatcagaattcctcaagcaggcctggtttattgaaaatgaagagcaggaatatgttcaaactgtgaagtcatccaaaggtggtcccggatcagcggtgagcccctatcctaccttcaatccatcctcggatgtcgctgccttgcataaggccataatggttaaaggtgtggatgaagcaaccatcattgacattctaactaagcgaaacaatgcacagcgtcaacagatcaaagcagcatatctccaggaaacaggaaagcccctggatgaaacactgaagaaagcccttacaggtcaccttgaggaggttgttttagctctgctaaaaactccagcgcaatttgatgctgatgaacttcgtgctgccatgaagggccttggaactgatgaagatactctaattgagattttggcatcaagaactaacaaagaaatcagagacattaacagggtctacagagaggaactgaagagagatctggccaaagacataacctcagacacatctggagattttcggaacgctttgctttctcttgctaagggtgaccgatctgaggactttggtgtgaatgaagacttggctgattcagatgccagggccttgtatgaagcaggagaaaggagaaaggggacagacgtaaacgtgttcaataccatccttaccaccagaagctatccacaacttcgcagagtgtttcagaaatacaccaagtacagtaagcatgacatgaacaaagttctggacctggagttgaaaggtgacattgagaaatgcctcacagctatcgtgaagtgcgccacaagcaaaccagctttctttgcagagaagcttcatcaagccatgaaaggtgttggaactcgccataaggcattgatcaggattatggtttcccgttctgaaattgacatgaatgatatcaaagcattctatcagaagatgtatggtatctccctttgccaagccatcctggatgaaaccaaaggagattatgagaaaatcctggtggctctttgtggaggaaactaaacattcccttgatggtctcaagctatgatcagaagactttaattatatattttcatcctataagcttaaataggaaagtttcttcaacaggattacagtgtagctacctacatgctgaaaaatatagcctttaaatcatttttatattataactctgtataatagagataagtccattttttaaaaatgttttccccaaaccataaaaccctatacaagttgttctagtaacaatacatgagaaagatgtctatgtagctgaaaataaaatgacgtcacaagacaaaaaaaaaaaaaaaaaaaaaaa

SEQ ID NO: 4261 - DNA, 7204 bp, Homo sapiens
  source 1..7204: mol_type = genomic DNA
gcatacctgcctgggtgtccaaatgtaactagatgctttcacaaaccccacccacaaagcagcacatgtttttaagacttcagttttctattcacatcggcctcataatacccaccctgacctgctgtaaaagacctggaacaaacaaaaatgattacacctacagtgaagatgcacaccatgtcctcctcgcatctcttctacctggcgctgtgcctgctcaccttcaccagctctgccacggctggaccggagacgctctgcggggctgagctggtggatgctcttcagttcgtgtgtggagacaggggcttttatttcaacaagcccacagggtatggctccagcagtcggagggcgcctcagacaggcatcgtggatgagtgctgcttccggagctgtgatctaaggaggctggagatgtattgcgcacccctcaagcctgccaagtcagctcgctctgtccgtgcccagcgccacaccgacatgcccaagacccagaaggaagtacatttgaagaacgcaagtagagggagtgcaggaaacaagaactacaggatgtaggaagaccctcctgaggagtgaagagtgacatgccaccgcaggatcctttgctctgcacgagttacctgttaaactttggaacacctaccaaaaaataagtttgataacatttaaaagatgggcgtttcccccaatgaaatacacaagtaaacattccaacattgtctttaggagtgatttgcaccttgcaaaaatggtcctggagttggtagattgctgttgatcttttatcaataatgttctatagaaaagaaaaaaaaaatatatatatatatatatcttagtccctgcctctcaagagccacaaatgcatgggtgttgtatagatccagttgcactaaattcctctctgaatcttggctgctggagccattcattcagcaaccttgtctaagtggtttatgaattgtttccttatttgcacttctttctacacaactcgggctgtttgttttacagtgtctgataatcttgttagtctatacccaccacctcccttcataacctttatatttgccgaatttggcctcctcaaaagcagcagcaagtcgtcaagaagcacaccaattctaacccacaagattccatctgtggcatttgtaccaaatataagttggatgcattttattttagacacaaagctttatttttccacatcatgcttacaaaaaagaataatgcaaatagttgcaactttgaggccaatcatttttaggcatatgttttaaacatagaaagtttcttcaactcaaaagagttccttcaaatgatgagttaatgtgcaacctaattagtaactttcctctttttattttttccatatagagcactatgtaaatttagcatatcaattatacaggatatatcaaacagtatgtaaaactctgttttttagtataatggtgctattttgtagtttgttatatgaaagagtctggccaaaacggtaatacgtgaaagcaaaacaataggggaagcctggagccaaagatgacacaaggggaagggtactgaaaacaccatccatttgggaaagaaggcaaagtccccccagttatgccttccaagaggaacttcagacacaaaagtccactgatgcaaattggactggcgagtccagagaggaaactgtggaatggaaaaagcagaaggctaggaattttagcagtcctggtttctttttctcatggaagaaatgaacatctgccagctgtgtcatggactcaccactgtgtgaccttgggcaagtcacttcacctctctgtgcctcagtttcctcatctgcaaaatgggggcaatatgtcatctacctacctcaaaggggtggtataaggtttaaaaagataaagattcagattttttttaccctgggttgctgtaagggtgcaacatcagggcgcttgagttgctgagatgcaaggaattctataaataacccattcatagcatagctagagattggtgaattgaatgctcctgacatctcagttcttgtcagtgaagctatccaaataactggccaactagttgttaaaagctaacagctcaatctcttaaaacacttttcaaaatatgtgggaagcatttgattttcaatttgattttgaattctgcatttggttttatgaatacaaagataagtgaaaagagagaaaggaaaagaaaaaggagaaaaacaaagagatttctaccagtgaaaggggaattaattactctttgttagcactcactgactcttctatgcagttactacatatctagtaaaacctcgtttaatactataaataatattctattcattttgaaaaacacaatgattccttcttttctaggcaatataaggaaagtgatccaaaatttgaaatattaaaataatatctaataaaaagtcacaaagttatcttctttaacaaactttactcttattcttagctgtatatacatttttttaaaagtttgttaaaatatgcttgactagagtttccagttgaaaggcaaaaacttccatcacaacaagaaatttcccatgcctgctcagaagggtagcccctagctctctgtgaatgtgttttatccattcaactgaaaattggtatcaagaaagtccactggttagtgtactagtccatcatagcctagaaaatgatccctatctgcagatcaagattttctcattagaacaatgaattatccagcattcagatctttctagtcaccttagaactttttggttaaaagtacccaggcttgattatttcatgcaaattctatattttacattcttggaaagtctatatgaaaaacaaaaataacatcttcagtttttctcccactgggtcacctcaaggatcagaggccaggaaaaaaaaaaaaaagactccctggatctctgaatatatgcaaaaagaaggccccatttagtggagccagcaatcctgttcagtcaacaagtattttaactctcagtccaacattatttgaattgagcacctcaagcatgcttagcaatgttctaatcactatggacagatgtaaaagaaactatacatcatttttgccctctgcctgttttccagacatacaggttctgtggaataagatactggactcctcttcccaagatggcacttctttttatttcttgtccccagtgtgtaccttttaaaattattccctctcaacaaaactttataggcagtcttctgcagacttaacgtgttttctgtcatagttagatgtgataattctaagagtgtctatgacttatttccttcacttaattctatccacagtcaaaaatcccccaaggaggaaagctgaaagatgcactgccatattatctttcttaactttttccaacacataatcctctccaactggattataaataaattgaaaataactcattataccaattcactattttattttttaatgaattaaaactagaaaacaaattgatgcaaaccctggaagtcagttgattactatatactacagcagaatgactcagatttcatagaaaggagcaaccaaaatgtcacaacccaaaactttacaagctttgcttcagaattagattgctttataattcttgaatgaggcaatttcaagatatttgtaaaagaacagtaaacattggtaagaatgagctttcaactcataggcttatttccaatttaattgaccatactggatacttaggtcaaatttctgttctctcttccccaaataatattaaagtattatttgaactttttaagatgaggcagttcccctgaaaaagttaatgcagctctccatcagaatccactcttctagggatatgaaaatctcttaacacccaccctacatacacagacacacacacacacacacacacacacacacacacacacattcaccctaaggatccaatggaatactgaaaagaaatcacttccttgaaaattttattaaaaaacaaacaaacaaacaaaaagcctgtccacccttgagaatccttcctctccttggaacgtcaatgtttgtgtagatgaaaccatctcatgctctgtggctccagggtttctgttactattttatgcacttgggagaaggcttagaataaaagatgtagcacattttgctttcccatttattgtttggccagctatgccaatgtggtgctattgtttctttaagaaagtacttgactaaaaaaaaaagaaaaaaagaaaaaaaagaaagcatagacatatttttttaaagtataaaaacaacaattctatagatagatggcttaataaaatagcattaggtctatctagccaccaccacctttcaactttttatcactcacaagtagtgtactgttcaccaaattgtgaatttgggggtgcaggggcaggagttggaaattttttaaagttagaaggctccattgttttgttggctctcaaacttagcaaaattagcaatatattatccaatcttctgaacttgatcaagagcatggagaataaacgcgggaaaaaagatcttataggcaaatagaagaatttaaaagataagtaagttccttattgatttttgtgcactctgctctaaaacagatattcagcaagtggagaaaataagaacaaagagaaaaaatacatagatttacctgcaaaaaatagcttctgccaaatcccccttgggtattctttggcatttactggtttatagaagacattctcccttcacccagacatctcaaagagcagtagctctcatgaaaagcaatcactgatctcatttgggaaatgttggaaagtatttccttatgagatgggggttatctactgataaagaaagaatttatgagaaattgttgaaagagatggctaacaatctgtgaagattttttgtttcttgtttttgttttttttttttttttactttatacagtctttatgaatttcttaatgttcaaaatgacttggttcttttcttctttttttatatcagaatgaggaataataagttaaacccacatagactctttaaaactataggctagatagaaatgtatgtttgacttgttgaagctataatcagactatttaaaatgttttgctatttttaatcttaaaagattgtgctaatttattagagcagaacctgtttggctctcctcagaagaaagaatctttccattcaaatcacatggctttccaccaatattttcaaaagataaatctgatttatgcaatggcatcatttattttaaaacagaagaattgtgaaagtttatgcccctcccttgcaaagaccataaagtccagatctggtaggggggcaacaacaaaaggaaaatgttgttgattcttggttttggattttgttttgttttcaatgctagtgtttaatcctgtagtacatatttgcttattgctattttaatattttataagaccttcctgttaggtattagaaagtgatacatagatatcttttttgtgtaatttctatttaaaaaagagagaagactgtcagaagctttaagtgcatatggtacaggataaagatatcaatttaaataaccaattcctatctggaacaatgcttttgttttttaaagaaacctctcacagataagacagaggcccaggggatttttgaagctgtctttattctgcccccatcccaacccagcccttattattttagtatctgcctcagaattttatagagggctgaccaagctgaaactctagaattaaaggaacctcactgaaaacatatatttcacgtgttccctctttttttttttcctttttgtgagatggggtctcgcactgtcccccaggctggagtgcagtggcatgatctcggctcactgcaacctccacctcctgggtttaagcgattctcctgcctcagcctcctgagtagctgggattacaggcacccaccactatgcccggctaattttttggatttttaatagagacggggttttaccatgttggccaggttggtctcaaactcctgaccttgtgatttgcccgcctcagcctcccaaattgctgggattacaggcatgagccaccacaccctgcccatgtgttccctcttaatgtatgattacatggatcttaaacatgatccttctctcctcattcttcaactatctttgatggggtctttcaaggggaaaaaaatccaagcttttttaaagtaaaaaaaaaaaaagagaggacacaaaaccaaatgttactgctcaactgaaatatgagttaagatggagacagagtttctcctaataaccggagctgaattacctttcactttcaaaaacatgaccttccacaatccttagaatctgcctttttttatattactgaggcctaaaagtaaacattactcattttattttgcccaaaatgcactgatgtaaagtaggaaaaataaaaacagagctctaaaatccctttcaagccacccattgaccccactcaccaactcatagcaaagtcacttctgttaatcccttaatctgattttgtttggatatttatcttgtacccgctgctaaacacactgcaggagggactctgaaacctcaagctgtctacttacatcttttatctgtgtctgtgtatcatgaaaatgtctattcaaaatatcaaaacctttcaaatatcacgcagcttatattcagtttacataaaggccccaaataccatgtcagatctttttggtaaaagagttaatgaactatgagaattgggattacatcatgtattttgcctcatgtatttttatcacacttataggccaagtgtgataaataaacttacagacactgaattaatttcccctgctactttgaaaccagaaaataatgactggccattcgttacatctgtcttagttgaaaagcatattttttattaaattaattctgattgtatttgaaattattattcaattcacttatggcagaggaatatcaatcctaatgacttctaaaaatgtaactaattgaatcattatcttacatttactgtttaataagcatattttgaaaatgtatggctagagtgtcataataaaatggtatatctttctttagtaattacattaaaattagtcatgtttgattaattagttc

SEQ ID NO: 4262 - DNA, 7415 bp, Homo sapiens
  source 1..7415: mol_type = genomic DNA
gaaggcaaatgttcccccagctgtttcctgtctacagtgtctgtgttttgtagataaatgtgaggattttctctaaatccctcttctgtttgctaaatctcactgtcactgctaaattcagagcagatagagcctgcgcaatggaataaagtcctcaaaattgaaatgtgacattgctctcaacatctcccatctctctggatttctttttgcttcattattcctgctaaccaattcattttcagactttgtacttcagaagcaatgggaaaaatcagcagtcttccaacccaattatttaagtgctgcttttgtgatttcttgaaggtgaagatgcacaccatgtcctcctcgcatctcttctacctggcgctgtgcctgctcaccttcaccagctctgccacggctggaccggagacgctctgcggggctgagctggtggatgctcttcagttcgtgtgtggagacaggggcttttatttcaacaagcccacagggtatggctccagcagtcggagggcgcctcagacaggcatcgtggatgagtgctgcttccggagctgtgatctaaggaggctggagatgtattgcgcacccctcaagcctgccaagtcagctcgctctgtccgtgcccagcgccacaccgacatgcccaagacccagaagtatcagcccccatctaccaacaagaacacgaagtctcagagaaggaaaggaagtacatttgaagaacgcaagtagagggagtgcaggaaacaagaactacaggatgtaggaagaccctcctgaggagtgaagagtgacatgccaccgcaggatcctttgctctgcacgagttacctgttaaactttggaacacctaccaaaaaataagtttgataacatttaaaagatgggcgtttcccccaatgaaatacacaagtaaacattccaacattgtctttaggagtgatttgcaccttgcaaaaatggtcctggagttggtagattgctgttgatcttttatcaataatgttctatagaaaagaaaaaaaaaatatatatatatatatatcttagtccctgcctctcaagagccacaaatgcatgggtgttgtatagatccagttgcactaaattcctctctgaatcttggctgctggagccattcattcagcaaccttgtctaagtggtttatgaattgtttccttatttgcacttctttctacacaactcgggctgtttgttttacagtgtctgataatcttgttagtctatacccaccacctcccttcataacctttatatttgccgaatttggcctcctcaaaagcagcagcaagtcgtcaagaagcacaccaattctaacccacaagattccatctgtggcatttgtaccaaatataagttggatgcattttattttagacacaaagctttatttttccacatcatgcttacaaaaaagaataatgcaaatagttgcaactttgaggccaatcatttttaggcatatgttttaaacatagaaagtttcttcaactcaaaagagttccttcaaatgatgagttaatgtgcaacctaattagtaactttcctctttttattttttccatatagagcactatgtaaatttagcatatcaattatacaggatatatcaaacagtatgtaaaactctgttttttagtataatggtgctattttgtagtttgttatatgaaagagtctggccaaaacggtaatacgtgaaagcaaaacaataggggaagcctggagccaaagatgacacaaggggaagggtactgaaaacaccatccatttgggaaagaaggcaaagtccccccagttatgccttccaagaggaacttcagacacaaaagtccactgatgcaaattggactggcgagtccagagaggaaactgtggaatggaaaaagcagaaggctaggaattttagcagtcctggtttctttttctcatggaagaaatgaacatctgccagctgtgtcatggactcaccactgtgtgaccttgggcaagtcacttcacctctctgtgcctcagtttcctcatctgcaaaatgggggcaatatgtcatctacctacctcaaaggggtggtataaggtttaaaaagataaagattcagattttttttaccctgggttgctgtaagggtgcaacatcagggcgcttgagttgctgagatgcaaggaattctataaataacccattcatagcatagctagagattggtgaattgaatgctcctgacatctcagttcttgtcagtgaagctatccaaataactggccaactagttgttaaaagctaacagctcaatctcttaaaacacttttcaaaatatgtgggaagcatttgattttcaatttgattttgaattctgcatttggttttatgaatacaaagataagtgaaaagagagaaaggaaaagaaaaaggagaaaaacaaagagatttctaccagtgaaaggggaattaattactctttgttagcactcactgactcttctatgcagttactacatatctagtaaaacctcgtttaatactataaataatattctattcattttgaaaaacacaatgattccttcttttctaggcaatataaggaaagtgatccaaaatttgaaatattaaaataatatctaataaaaagtcacaaagttatcttctttaacaaactttactcttattcttagctgtatatacatttttttaaaagtttgttaaaatatgcttgactagagtttccagttgaaaggcaaaaacttccatcacaacaagaaatttcccatgcctgctcagaagggtagcccctagctctctgtgaatgtgttttatccattcaactgaaaattggtatcaagaaagtccactggttagtgtactagtccatcatagcctagaaaatgatccctatctgcagatcaagattttctcattagaacaatgaattatccagcattcagatctttctagtcaccttagaactttttggttaaaagtacccaggcttgattatttcatgcaaattctatattttacattcttggaaagtctatatgaaaaacaaaaataacatcttcagtttttctcccactgggtcacctcaaggatcagaggccaggaaaaaaaaaaaaaagactccctggatctctgaatatatgcaaaaagaaggccccatttagtggagccagcaatcctgttcagtcaacaagtattttaactctcagtccaacattatttgaattgagcacctcaagcatgcttagcaatgttctaatcactatggacagatgtaaaagaaactatacatcatttttgccctctgcctgttttccagacatacaggttctgtggaataagatactggactcctcttcccaagatggcacttctttttatttcttgtccccagtgtgtaccttttaaaattattccctctcaacaaaactttataggcagtcttctgcagacttaacgtgttttctgtcatagttagatgtgataattctaagagtgtctatgacttatttccttcacttaattctatccacagtcaaaaatcccccaaggaggaaagctgaaagatgcactgccatattatctttcttaactttttccaacacataatcctctccaactggattataaataaattgaaaataactcattataccaattcactattttattttttaatgaattaaaactagaaaacaaattgatgcaaaccctggaagtcagttgattactatatactacagcagaatgactcagatttcatagaaaggagcaaccaaaatgtcacaacccaaaactttacaagctttgcttcagaattagattgctttataattcttgaatgaggcaatttcaagatatttgtaaaagaacagtaaacattggtaagaatgagctttcaactcataggcttatttccaatttaattgaccatactggatacttaggtcaaatttctgttctctcttccccaaataatattaaagtattatttgaactttttaagatgaggcagttcccctgaaaaagttaatgcagctctccatcagaatccactcttctagggatatgaaaatctcttaacacccaccctacatacacagacacacacacacacacacacacacacacacacacacacattcaccctaaggatccaatggaatactgaaaagaaatcacttccttgaaaattttattaaaaaacaaacaaacaaacaaaaagcctgtccacccttgagaatccttcctctccttggaacgtcaatgtttgtgtagatgaaaccatctcatgctctgtggctccagggtttctgttactattttatgcacttgggagaaggcttagaataaaagatgtagcacattttgctttcccatttattgtttggccagctatgccaatgtggtgctattgtttctttaagaaagtacttgactaaaaaaaaaagaaaaaaagaaaaaaaagaaagcatagacatatttttttaaagtataaaaacaacaattctatagatagatggcttaataaaatagcattaggtctatctagccaccaccacctttcaactttttatcactcacaagtagtgtactgttcaccaaattgtgaatttgggggtgcaggggcaggagttggaaattttttaaagttagaaggctccattgttttgttggctctcaaacttagcaaaattagcaatatattatccaatcttctgaacttgatcaagagcatggagaataaacgcgggaaaaaagatcttataggcaaatagaagaatttaaaagataagtaagttccttattgatttttgtgcactctgctctaaaacagatattcagcaagtggagaaaataagaacaaagagaaaaaatacatagatttacctgcaaaaaatagcttctgccaaatcccccttgggtattctttggcatttactggtttatagaagacattctcccttcacccagacatctcaaagagcagtagctctcatgaaaagcaatcactgatctcatttgggaaatgttggaaagtatttccttatgagatgggggttatctactgataaagaaagaatttatgagaaattgttgaaagagatggctaacaatctgtgaagattttttgtttcttgtttttgttttttttttttttttactttatacagtctttatgaatttcttaatgttcaaaatgacttggttcttttcttctttttttatatcagaatgaggaataataagttaaacccacatagactctttaaaactataggctagatagaaatgtatgtttgacttgttgaagctataatcagactatttaaaatgttttgctatttttaatcttaaaagattgtgctaatttattagagcagaacctgtttggctctcctcagaagaaagaatctttccattcaaatcacatggctttccaccaatattttcaaaagataaatctgatttatgcaatggcatcatttattttaaaacagaagaattgtgaaagtttatgcccctcccttgcaaagaccataaagtccagatctggtaggggggcaacaacaaaaggaaaatgttgttgattcttggttttggattttgttttgttttcaatgctagtgtttaatcctgtagtacatatttgcttattgctattttaatattttataagaccttcctgttaggtattagaaagtgatacatagatatcttttttgtgtaatttctatttaaaaaagagagaagactgtcagaagctttaagtgcatatggtacaggataaagatatcaatttaaataaccaattcctatctggaacaatgcttttgttttttaaagaaacctctcacagataagacagaggcccaggggatttttgaagctgtctttattctgcccccatcccaacccagcccttattattttagtatctgcctcagaattttatagagggctgaccaagctgaaactctagaattaaaggaacctcactgaaaacatatatttcacgtgttccctctttttttttttcctttttgtgagatggggtctcgcactgtcccccaggctggagtgcagtggcatgatctcggctcactgcaacctccacctcctgggtttaagcgattctcctgcctcagcctcctgagtagctgggattacaggcacccaccactatgcccggctaattttttggatttttaatagagacggggttttaccatgttggccaggttggtctcaaactcctgaccttgtgatttgcccgcctcagcctcccaaattgctgggattacaggcatgagccaccacaccctgcccatgtgttccctcttaatgtatgattacatggatcttaaacatgatccttctctcctcattcttcaactatctttgatggggtctttcaaggggaaaaaaatccaagcttttttaaagtaaaaaaaaaaaaagagaggacacaaaaccaaatgttactgctcaactgaaatatgagttaagatggagacagagtttctcctaataaccggagctgaattacctttcactttcaaaaacatgaccttccacaatccttagaatctgcctttttttatattactgaggcctaaaagtaaacattactcattttattttgcccaaaatgcactgatgtaaagtaggaaaaataaaaacagagctctaaaatccctttcaagccacccattgaccccactcaccaactcatagcaaagtcacttctgttaatcccttaatctgattttgtttggatatttatcttgtacccgctgctaaacacactgcaggagggactctgaaacctcaagctgtctacttacatcttttatctgtgtctgtgtatcatgaaaatgtctattcaaaatatcaaaacctttcaaatatcacgcagcttatattcagtttacataaaggccccaaataccatgtcagatctttttggtaaaagagttaatgaactatgagaattgggattacatcatgtattttgcctcatgtatttttatcacacttataggccaagtgtgataaataaacttacagacactgaattaatttcccctgctactttgaaaccagaaaataatgactggccattcgttacatctgtcttagttgaaaagcatattttttattaaattaattctgattgtatttgaaattattattcaattcacttatggcagaggaatatcaatcctaatgacttctaaaaatgtaactaattgaatcattatcttacatttactgtttaataagcatattttgaaaatgtatggctagagtgtcataataaaatggtatatctttctttagtaattacattaaaattagtcatgtttgattaattagttc

SEQ ID NO: 4263 - DNA, 7366 bp, Homo sapiens
  source 1..7366: mol_type = genomic DNA
gaaggcaaatgttcccccagctgtttcctgtctacagtgtctgtgttttgtagataaatgtgaggattttctctaaatccctcttctgtttgctaaatctcactgtcactgctaaattcagagcagatagagcctgcgcaatggaataaagtcctcaaaattgaaatgtgacattgctctcaacatctcccatctctctggatttctttttgcttcattattcctgctaaccaattcattttcagactttgtacttcagaagcaatgggaaaaatcagcagtcttccaacccaattatttaagtgctgcttttgtgatttcttgaaggtgaagatgcacaccatgtcctcctcgcatctcttctacctggcgctgtgcctgctcaccttcaccagctctgccacggctggaccggagacgctctgcggggctgagctggtggatgctcttcagttcgtgtgtggagacaggggcttttatttcaacaagcccacagggtatggctccagcagtcggagggcgcctcagacaggcatcgtggatgagtgctgcttccggagctgtgatctaaggaggctggagatgtattgcgcacccctcaagcctgccaagtcagctcgctctgtccgtgcccagcgccacaccgacatgcccaagacccagaaggaagtacatttgaagaacgcaagtagagggagtgcaggaaacaagaactacaggatgtaggaagaccctcctgaggagtgaagagtgacatgccaccgcaggatcctttgctctgcacgagttacctgttaaactttggaacacctaccaaaaaataagtttgataacatttaaaagatgggcgtttcccccaatgaaatacacaagtaaacattccaacattgtctttaggagtgatttgcaccttgcaaaaatggtcctggagttggtagattgctgttgatcttttatcaataatgttctatagaaaagaaaaaaaaaatatatatatatatatatcttagtccctgcctctcaagagccacaaatgcatgggtgttgtatagatccagttgcactaaattcctctctgaatcttggctgctggagccattcattcagcaaccttgtctaagtggtttatgaattgtttccttatttgcacttctttctacacaactcgggctgtttgttttacagtgtctgataatcttgttagtctatacccaccacctcccttcataacctttatatttgccgaatttggcctcctcaaaagcagcagcaagtcgtcaagaagcacaccaattctaacccacaagattccatctgtggcatttgtaccaaatataagttggatgcattttattttagacacaaagctttatttttccacatcatgcttacaaaaaagaataatgcaaatagttgcaactttgaggccaatcatttttaggcatatgttttaaacatagaaagtttcttcaactcaaaagagttccttcaaatgatgagttaatgtgcaacctaattagtaactttcctctttttattttttccatatagagcactatgtaaatttagcatatcaattatacaggatatatcaaacagtatgtaaaactctgttttttagtataatggtgctattttgtagtttgttatatgaaagagtctggccaaaacggtaatacgtgaaagcaaaacaataggggaagcctggagccaaagatgacacaaggggaagggtactgaaaacaccatccatttgggaaagaaggcaaagtccccccagttatgccttccaagaggaacttcagacacaaaagtccactgatgcaaattggactggcgagtccagagaggaaactgtggaatggaaaaagcagaaggctaggaattttagcagtcctggtttctttttctcatggaagaaatgaacatctgccagctgtgtcatggactcaccactgtgtgaccttgggcaagtcacttcacctctctgtgcctcagtttcctcatctgcaaaatgggggcaatatgtcatctacctacctcaaaggggtggtataaggtttaaaaagataaagattcagattttttttaccctgggttgctgtaagggtgcaacatcagggcgcttgagttgctgagatgcaaggaattctataaataacccattcatagcatagctagagattggtgaattgaatgctcctgacatctcagttcttgtcagtgaagctatccaaataactggccaactagttgttaaaagctaacagctcaatctcttaaaacacttttcaaaatatgtgggaagcatttgattttcaatttgattttgaattctgcatttggttttatgaatacaaagataagtgaaaagagagaaaggaaaagaaaaaggagaaaaacaaagagatttctaccagtgaaaggggaattaattactctttgttagcactcactgactcttctatgcagttactacatatctagtaaaacctcgtttaatactataaataatattctattcattttgaaaaacacaatgattccttcttttctaggcaatataaggaaagtgatccaaaatttgaaatattaaaataatatctaataaaaagtcacaaagttatcttctttaacaaactttactcttattcttagctgtatatacatttttttaaaagtttgttaaaatatgcttgactagagtttccagttgaaaggcaaaaacttccatcacaacaagaaatttcccatgcctgctcagaagggtagcccctagctctctgtgaatgtgttttatccattcaactgaaaattggtatcaagaaagtccactggttagtgtactagtccatcatagcctagaaaatgatccctatctgcagatcaagattttctcattagaacaatgaattatccagcattcagatctttctagtcaccttagaactttttggttaaaagtacccaggcttgattatttcatgcaaattctatattttacattcttggaaagtctatatgaaaaacaaaaataacatcttcagtttttctcccactgggtcacctcaaggatcagaggccaggaaaaaaaaaaaaaagactccctggatctctgaatatatgcaaaaagaaggccccatttagtggagccagcaatcctgttcagtcaacaagtattttaactctcagtccaacattatttgaattgagcacctcaagcatgcttagcaatgttctaatcactatggacagatgtaaaagaaactatacatcatttttgccctctgcctgttttccagacatacaggttctgtggaataagatactggactcctcttcccaagatggcacttctttttatttcttgtccccagtgtgtaccttttaaaattattccctctcaacaaaactttataggcagtcttctgcagacttaacgtgttttctgtcatagttagatgtgataattctaagagtgtctatgacttatttccttcacttaattctatccacagtcaaaaatcccccaaggaggaaagctgaaagatgcactgccatattatctttcttaactttttccaacacataatcctctccaactggattataaataaattgaaaataactcattataccaattcactattttattttttaatgaattaaaactagaaaacaaattgatgcaaaccctggaagtcagttgattactatatactacagcagaatgactcagatttcatagaaaggagcaaccaaaatgtcacaacccaaaactttacaagctttgcttcagaattagattgctttataattcttgaatgaggcaatttcaagatatttgtaaaagaacagtaaacattggtaagaatgagctttcaactcataggcttatttccaatttaattgaccatactggatacttaggtcaaatttctgttctctcttccccaaataatattaaagtattatttgaactttttaagatgaggcagttcccctgaaaaagttaatgcagctctccatcagaatccactcttctagggatatgaaaatctcttaacacccaccctacatacacagacacacacacacacacacacacacacacacacacacacattcaccctaaggatccaatggaatactgaaaagaaatcacttccttgaaaattttattaaaaaacaaacaaacaaacaaaaagcctgtccacccttgagaatccttcctctccttggaacgtcaatgtttgtgtagatgaaaccatctcatgctctgtggctccagggtttctgttactattttatgcacttgggagaaggcttagaataaaagatgtagcacattttgctttcccatttattgtttggccagctatgccaatgtggtgctattgtttctttaagaaagtacttgactaaaaaaaaaagaaaaaaagaaaaaaaagaaagcatagacatatttttttaaagtataaaaacaacaattctatagatagatggcttaataaaatagcattaggtctatctagccaccaccacctttcaactttttatcactcacaagtagtgtactgttcaccaaattgtgaatttgggggtgcaggggcaggagttggaaattttttaaagttagaaggctccattgttttgttggctctcaaacttagcaaaattagcaatatattatccaatcttctgaacttgatcaagagcatggagaataaacgcgggaaaaaagatcttataggcaaatagaagaatttaaaagataagtaagttccttattgatttttgtgcactctgctctaaaacagatattcagcaagtggagaaaataagaacaaagagaaaaaatacatagatttacctgcaaaaaatagcttctgccaaatcccccttgggtattctttggcatttactggtttatagaagacattctcccttcacccagacatctcaaagagcagtagctctcatgaaaagcaatcactgatctcatttgggaaatgttggaaagtatttccttatgagatgggggttatctactgataaagaaagaatttatgagaaattgttgaaagagatggctaacaatctgtgaagattttttgtttcttgtttttgttttttttttttttttactttatacagtctttatgaatttcttaatgttcaaaatgacttggttcttttcttctttttttatatcagaatgaggaataataagttaaacccacatagactctttaaaactataggctagatagaaatgtatgtttgacttgttgaagctataatcagactatttaaaatgttttgctatttttaatcttaaaagattgtgctaatttattagagcagaacctgtttggctctcctcagaagaaagaatctttccattcaaatcacatggctttccaccaatattttcaaaagataaatctgatttatgcaatggcatcatttattttaaaacagaagaattgtgaaagtttatgcccctcccttgcaaagaccataaagtccagatctggtaggggggcaacaacaaaaggaaaatgttgttgattcttggttttggattttgttttgttttcaatgctagtgtttaatcctgtagtacatatttgcttattgctattttaatattttataagaccttcctgttaggtattagaaagtgatacatagatatcttttttgtgtaatttctatttaaaaaagagagaagactgtcagaagctttaagtgcatatggtacaggataaagatatcaatttaaataaccaattcctatctggaacaatgcttttgttttttaaagaaacctctcacagataagacagaggcccaggggatttttgaagctgtctttattctgcccccatcccaacccagcccttattattttagtatctgcctcagaattttatagagggctgaccaagctgaaactctagaattaaaggaacctcactgaaaacatatatttcacgtgttccctctttttttttttcctttttgtgagatggggtctcgcactgtcccccaggctggagtgcagtggcatgatctcggctcactgcaacctccacctcctgggtttaagcgattctcctgcctcagcctcctgagtagctgggattacaggcacccaccactatgcccggctaattttttggatttttaatagagacggggttttaccatgttggccaggttggtctcaaactcctgaccttgtgatttgcccgcctcagcctcccaaattgctgggattacaggcatgagccaccacaccctgcccatgtgttccctcttaatgtatgattacatggatcttaaacatgatccttctctcctcattcttcaactatctttgatggggtctttcaaggggaaaaaaatccaagcttttttaaagtaaaaaaaaaaaaagagaggacacaaaaccaaatgttactgctcaactgaaatatgagttaagatggagacagagtttctcctaataaccggagctgaattacctttcactttcaaaaacatgaccttccacaatccttagaatctgcctttttttatattactgaggcctaaaagtaaacattactcattttattttgcccaaaatgcactgatgtaaagtaggaaaaataaaaacagagctctaaaatccctttcaagccacccattgaccccactcaccaactcatagcaaagtcacttctgttaatcccttaatctgattttgtttggatatttatcttgtacccgctgctaaacacactgcaggagggactctgaaacctcaagctgtctacttacatcttttatctgtgtctgtgtatcatgaaaatgtctattcaaaatatcaaaacctttcaaatatcacgcagcttatattcagtttacataaaggccccaaataccatgtcagatctttttggtaaaagagttaatgaactatgagaattgggattacatcatgtattttgcctcatgtatttttatcacacttataggccaagtgtgataaataaacttacagacactgaattaatttcccctgctactttgaaaccagaaaataatgactggccattcgttacatctgtcttagttgaaaagcatattttttattaaattaattctgattgtatttgaaattattattcaattcacttatggcagaggaatatcaatcctaatgacttctaaaaatgtaactaattgaatcattatcttacatttactgtttaataagcatattttgaaaatgtatggctagagtgtcataataaaatggtatatctttctttagtaattacattaaaattagtcatgtttgattaattagttc

SEQ ID NO: 4264 - DNA, 5162 bp, Homo sapiens
  source 1..5162: mol_type = genomic DNA
ccgctaatgtaccatgccctggtgctggaaagtgcctgagccagctgccccagcggcctcagcactaccaagttggcacaaagctccccaaattcggaggggctcagggaaacgagtggaggggatgaggaggtgaggggtaaacccatcatttcagttggcatttgagcaggtgccatgctcagcggagatgaggctctcccatctgtaggggccgtattaacatgcacactctaaaagtgcccttcgtttctccagcctcagctttgtccctctcctcctccacgtcaacctggccagagggtctggacgccacagccagggcaccccctgctttggtggtgactgctaatattggccaggccggcggatcatcgtccaggcagtttcggcagagagccttgggcaccagtgactccccggtcctctttatccactgtccaggagctgcggggactgcgcagggactagagtacaggggccgaagagtcaccaccgagcttgtgtgggaggaggtggattccagcccccagccccagggctctgaatcgctgccagctcagccccctgcccagcctgccccacagcctgagccccagcaggccagagagcccagtcctgaggtgagctgctgtggcctgtggcccaggcgaccccagcgctcccagaactgaggctggcagccagccccagcctcagccccaactgcgaggcagagagacaccaatgggaatcccaatggggaagtcgatgctggtgcttctcaccttcttggccttcgcctcgtgctgcattgctgcttaccgccccagtgagaccctgtgcggcggggagctggtggacaccctccagttcgtctgtggggaccgcggcttctacttcagcaggcccgcaagccgtgtgagccgtcgcagccgtggcatcgttgaggagtgctgtttccgcagctgtgacctggccctcctggagacgtactgtgctacccccgccaagtccgagagggacgtgtcgacccctccgaccgtgcttccggacaacttccccagataccccgtgggcaagttcttccaatatgacacctggaagcagtccacccagcgcctgcgcaggggcctgcctgccctcctgcgtgcccgccggggtcacgtgctcgccaaggagctcgaggcgttcagggaggccaaacgtcaccgtcccctgattgctctacccacccaagaccccgcccacgggggcgcccccccagagatggccagcaatcggaagtgagcaaaactgccgcaagtctgcagcccggcgccaccatcctgcagcctcctcctgaccacggacgtttccatcaggttccatcccgaaaatctctcggttccacgtccccctggggcttctcctgacccagtccccgtgccccgcctccccgaaacaggctactctcctcggccccctccatcgggctgaggaagcacagcagcatcttcaaacatgtacaaaatcgattggctttaaacacccttcacataccctccccccaaattatccccaattatccccacacataaaaaatcaaaacattaaactaacccccttcccccccccccacaacaaccctcttaaaactaattggctttttagaaacaccccacaaaagctcagaaattggctttaaaaaaaacaaccaccaaaaaaaatcaattggctaaaaaaaaaaagtattaaaaacgaattggctgagaaacaattggcaaaataaaggaatttggcactccccacccccctctttctcttctcccttggactttgagtcaaattggcctggacttgagtccctgaaccagcaaagagaaaagaaggaccccagaaatcacaggtgggcacgtcgctgctaccgccatctcccttctcacgggaattttcagggtaaactggccatccgaaaatagcaacaacccagactggctcctcactcccttttccatcactaaaaatcacagagcagtcagagggacccagtaagaccaaaggaggggaggacagagcatgaaaaccaaaatccatgcaaatgaaatgtaattggcacgaccctcacccccaaatcttacatctcaattcccatcctaaaaagcactcatactttatgcatccccgcagctacacacacacaacacacagcacacgcatgaacacagcacacacacgagcacagcacacacacaaacgcacagcacacacagcacacagatgagcacacagcacacacacaaacgcacagcacacacacgcacacacatgcacacacagcacacaaacgcacggcacacacacgcacacacatgcacacacagcacacacacaaacgcacagcacacacaaacgcacagcacacacgcacacacagcacacacacgagcacacagcacacaaacgcacagcacacgcacacacatgcacacacagcacacacactagcacacagcacacacacaaagacacagcacacacatgcacacacagcacacacacgcgaacacagcacacacgaacacagcacacacagcacacacacaaacacagcacacacatgcacacagcacacgcacacacagcacacacatgaacacagcacacagcacacacatgcacacacagcacacacgcatgcacagcacacatgaacacagcacacacacaaacacacagcacacacatgcacacacagcacacacactcatgcgcagcacatacatgaacacagctcacagcacacaaacacgcagcacacacgttgcacacgcaagcacccacctgcacacacacatgcgcacacacacgcacacccccacaaaattggatgaaaacaataagcatatctaagcaactacgatatctgtatggatcaggccaaagtcccgctaagattctccaatgttttcatggtctgagccccgctcctgttcccatctccactgcccctcggccctgtctgtgccctgcctctcagaggagggggctcagatggtgcggcctgagtgtgcggccggcggcatttgggatacacccgtagggtgggcggggtgtgtcccaggcctaattccatctttccaccatgacagagatgcccttgtgaggctggcctccttggcgcctgtccccacggcccccgcagcgtgagccacgatgctccccataccccacccattcccgatacaccttacttactgtgtgttggcccagccagagtgaggaaggagtttggccacattggagatggcggtagctgagcagacatgcccccacgagtagcctgactccctggtgtgctcctggaaggaagatcttggggacccccccaccggagcacacctagggatcatctttgcccgtctcctggggaccccccaagaaatgtggagtcctcgggggccgtgcactgatgcggggagtgtgggaagtctggcggttggaggggtgggtggggggcagtgggggctgggcggggggagttctggggtaggaagtggtcccgggagattttggatggaaaagtcaggaggattgacagcagacttgcagaattacatagagaaattaggaacccccaaatttcatgtcaattgatctattccccctctttgtttcttggggcatttttccttttttttttttttttgttttttttttacccctccttagctttatgcgctcagaaaccaaattaaaccccccccccatgtaacaggggggcagtgacaaaagcaagaacgcacgaagccagcctggagaccaccacgtcctgccccccgccatttatcgccctgattggattttgtttttcatctgtccctgttgcttgggttgagttgagggtggagcctcctggggggcactggccactgagcccccttggagaagtcagaggggagtggagaaggccactgtccggcctggcttctggggacagtggctggtccccagaagtcctgagggcggaggggggggttgggcagggtctcctcaggtgtcaggagggtgctcggaggccacaggagggggctcctggctggcctgaggctggccggaggggaaggggctagcaggtgtgtaaacagagggttccatcaggctggggcagggtggccgccttccgcacacttgaggaaccctcccctctccctcggtgacatcttgcccgcccctcagcaccctgccttgtctccaggaggtccgaagctctgtgggacctcttgggggcaaggtggggtgaggccggggagtagggaggtcaggcgggtctgagcccacagagcaggagagctgccaggtctgcccatcgaccaggttgcttgggccccggagcccacgggtctggtgatgccatagcagccaccaccgcggcgcctagggctgcggcagggactcggcctctgggaggtttacctcgcccccacttgtgcccccagctcagcccccctgcacgcagcccgactagcagtctagaggcctgaggcttctgggtcctggtgacggggctggcatgaccccgggggtcgtccatgccagtccgcctcagtcgcagagggtccctcggcaagcgccctgtgagtgggccattcggaacattggacagaagcccaaagagccaaattgtcacaattgtggaacccacattggcctgagatccaaaacgcttcgaggcaccccaaattacctgcccattcgtcaggacacccacccacccagtgttatattctgcctcgccggagtgggtgttcccgggggcacttgccgaccagccccttgcgtccccaggtttgcagctctcccctgggccactaaccatcctggcccgggctgcctgtctgacctccgtgcctagtcgtggctctccatcttgtctcctccccgtgtccccaatgtcttcagtggggggccccctcttgggtcccctcctctgccatcacctgaagacccccacgccaaacactgaatgtcacctgtgcctgccgcctcggtccaccttgcggcccgtgtttgactcaactcaactcctttaacgctaatatttccggcaaaatcccatgcttgggttttgtctttaaccttgtaacgcttgcaatcccaataaagcattaaaagtcatgatcttcaaaaaaaaaaaaaaaaaa

SEQ ID NO: 4265 - DNA, 5188 bp, Homo sapiens
  source 1..5188: mol_type = genomic DNA
cgcctgtccccctcccgaggcccgggctcgcgacggcagagggctccgtcggcccaaaccgagctgggcgcccgcggtccgggtgcagcctccactccgccccccagtcaccgcctcccccggcccctcgacgtggcgcccttccctccgcttctctgtgctccccgcgcccctcttggcgtctggccccggcccccgctctttctcccgcaaccttcccttcgctccctcccgtcccccccagctcctagcctccgactccctccccccctcacgcccgccctctcgccttcgccgaaccaaagtggattaattacacgctttctgtttctctccgtgctgttctctcccgctgtgcgcctgcccgcctctcgctgtcctctctccccctcgccctctcttcggcccccccctttcacgttcactctgtctctcccactatctctgcccccctctatccttgatacaacagctgacctcatttcccgataccttttcccccccgaaaagtacaacatctggcccgccccagcccgaagacagcccgtcctccctggacaatcagacgaattctccccccccccccaaaaaaaagccatccccccgctctgccccgtcgcacattcggcccccgcgactcggccagagcggcgctggcagaggagtgtccggcaggagggccaacgcccgctgttcggtttgcgacacgcagcagggaggtgggcggcagcgtcgccggcttccagacaccaatgggaatcccaatggggaagtcgatgctggtgcttctcaccttcttggccttcgcctcgtgctgcattgctgcttaccgccccagtgagaccctgtgcggcggggagctggtggacaccctccagttcgtctgtggggaccgcggcttctacttcagcaggcccgcaagccgtgtgagccgtcgcagccgtggcatcgttgaggagtgctgtttccgcagctgtgacctggccctcctggagacgtactgtgctacccccgccaagtccgagagggacgtgtcgacccctccgaccgtgcttccggacaacttccccagataccccgtgggcaagttcttccaatatgacacctggaagcagtccacccagcgcctgcgcaggggcctgcctgccctcctgcgtgcccgccggggtcacgtgctcgccaaggagctcgaggcgttcagggaggccaaacgtcaccgtcccctgattgctctacccacccaagaccccgcccacgggggcgcccccccagagatggccagcaatcggaagtgagcaaaactgccgcaagtctgcagcccggcgccaccatcctgcagcctcctcctgaccacggacgtttccatcaggttccatcccgaaaatctctcggttccacgtccccctggggcttctcctgacccagtccccgtgccccgcctccccgaaacaggctactctcctcggccccctccatcgggctgaggaagcacagcagcatcttcaaacatgtacaaaatcgattggctttaaacacccttcacataccctccccccaaattatccccaattatccccacacataaaaaatcaaaacattaaactaacccccttcccccccccccacaacaaccctcttaaaactaattggctttttagaaacaccccacaaaagctcagaaattggctttaaaaaaaacaaccaccaaaaaaaatcaattggctaaaaaaaaaaagtattaaaaacgaattggctgagaaacaattggcaaaataaaggaatttggcactccccacccccctctttctcttctcccttggactttgagtcaaattggcctggacttgagtccctgaaccagcaaagagaaaagaaggaccccagaaatcacaggtgggcacgtcgctgctaccgccatctcccttctcacgggaattttcagggtaaactggccatccgaaaatagcaacaacccagactggctcctcactcccttttccatcactaaaaatcacagagcagtcagagggacccagtaagaccaaaggaggggaggacagagcatgaaaaccaaaatccatgcaaatgaaatgtaattggcacgaccctcacccccaaatcttacatctcaattcccatcctaaaaagcactcatactttatgcatccccgcagctacacacacacaacacacagcacacgcatgaacacagcacacacacgagcacagcacacacacaaacgcacagcacacacagcacacagatgagcacacagcacacacacaaacgcacagcacacacacgcacacacatgcacacacagcacacaaacgcacggcacacacacgcacacacatgcacacacagcacacacacaaacgcacagcacacacaaacgcacagcacacacgcacacacagcacacacacgagcacacagcacacaaacgcacagcacacgcacacacatgcacacacagcacacacactagcacacagcacacacacaaagacacagcacacacatgcacacacagcacacacacgcgaacacagcacacacgaacacagcacacacagcacacacacaaacacagcacacacatgcacacagcacacgcacacacagcacacacatgaacacagcacacagcacacacatgcacacacagcacacacgcatgcacagcacacatgaacacagcacacacacaaacacacagcacacacatgcacacacagcacacacactcatgcgcagcacatacatgaacacagctcacagcacacaaacacgcagcacacacgttgcacacgcaagcacccacctgcacacacacatgcgcacacacacgcacacccccacaaaattggatgaaaacaataagcatatctaagcaactacgatatctgtatggatcaggccaaagtcccgctaagattctccaatgttttcatggtctgagccccgctcctgttcccatctccactgcccctcggccctgtctgtgccctgcctctcagaggagggggctcagatggtgcggcctgagtgtgcggccggcggcatttgggatacacccgtagggtgggcggggtgtgtcccaggcctaattccatctttccaccatgacagagatgcccttgtgaggctggcctccttggcgcctgtccccacggcccccgcagcgtgagccacgatgctccccataccccacccattcccgatacaccttacttactgtgtgttggcccagccagagtgaggaaggagtttggccacattggagatggcggtagctgagcagacatgcccccacgagtagcctgactccctggtgtgctcctggaaggaagatcttggggacccccccaccggagcacacctagggatcatctttgcccgtctcctggggaccccccaagaaatgtggagtcctcgggggccgtgcactgatgcggggagtgtgggaagtctggcggttggaggggtgggtggggggcagtgggggctgggcggggggagttctggggtaggaagtggtcccgggagattttggatggaaaagtcaggaggattgacagcagacttgcagaattacatagagaaattaggaacccccaaatttcatgtcaattgatctattccccctctttgtttcttggggcatttttccttttttttttttttttgttttttttttacccctccttagctttatgcgctcagaaaccaaattaaaccccccccccatgtaacaggggggcagtgacaaaagcaagaacgcacgaagccagcctggagaccaccacgtcctgccccccgccatttatcgccctgattggattttgtttttcatctgtccctgttgcttgggttgagttgagggtggagcctcctggggggcactggccactgagcccccttggagaagtcagaggggagtggagaaggccactgtccggcctggcttctggggacagtggctggtccccagaagtcctgagggcggaggggggggttgggcagggtctcctcaggtgtcaggagggtgctcggaggccacaggagggggctcctggctggcctgaggctggccggaggggaaggggctagcaggtgtgtaaacagagggttccatcaggctggggcagggtggccgccttccgcacacttgaggaaccctcccctctccctcggtgacatcttgcccgcccctcagcaccctgccttgtctccaggaggtccgaagctctgtgggacctcttgggggcaaggtggggtgaggccggggagtagggaggtcaggcgggtctgagcccacagagcaggagagctgccaggtctgcccatcgaccaggttgcttgggccccggagcccacgggtctggtgatgccatagcagccaccaccgcggcgcctagggctgcggcagggactcggcctctgggaggtttacctcgcccccacttgtgcccccagctcagcccccctgcacgcagcccgactagcagtctagaggcctgaggcttctgggtcctggtgacggggctggcatgaccccgggggtcgtccatgccagtccgcctcagtcgcagagggtccctcggcaagcgccctgtgagtgggccattcggaacattggacagaagcccaaagagccaaattgtcacaattgtggaacccacattggcctgagatccaaaacgcttcgaggcaccccaaattacctgcccattcgtcaggacacccacccacccagtgttatattctgcctcgccggagtgggtgttcccgggggcacttgccgaccagccccttgcgtccccaggtttgcagctctcccctgggccactaaccatcctggcccgggctgcctgtctgacctccgtgcctagtcgtggctctccatcttgtctcctccccgtgtccccaatgtcttcagtggggggccccctcttgggtcccctcctctgccatcacctgaagacccccacgccaaacactgaatgtcacctgtgcctgccgcctcggtccaccttgcggcccgtgtttgactcaactcaactcctttaacgctaatatttccggcaaaatcccatgcttgggttttgtctttaaccttgtaacgcttgcaatcccaataaagcattaaaagtcatgatcttcaaaaaaaaaaaaaaaaaa

SEQ ID NO: 4266 - DNA, 469 bp, Homo sapiens
  source 1..469: mol_type = genomic DNA
agccctccaggacaggctgcatcagaagaggccatcaagcagatcactgtccttctgccatggccctgtggatgcgcctcctgcccctgctggcgctgctggccctctggggacctgacccagccgcagcctttgtgaaccaacacctgtgcggctcacacctggtggaagctctctacctagtgtgcggggaacgaggcttcttctacacacccaagacccgccgggaggcagaggacctgcaggtggggcaggtggagctgggcgggggccctggtgcaggcagcctgcagcccttggccctggaggggtccctgcagaagcgtggcattgtggaacaatgctgtaccagcatctgctccctctaccagctggagaactactgcaactagacgcagcccgcaggcagccccacacccgccgcctcctgcaccgagagagatggaataaagcccttgaaccagcaaaa

SEQ ID NO: 4267 - DNA, 4875 bp, Homo sapiens
  source 1..4875: mol_type = genomic DNA
acacacttgggtcggccgcgcgccctcaggacgtggacagggagggcttccccgtgtccaggaaagcgaccgggcattgcccccagtctcccccaaatttgggcattgtccccgggtcttccaacggactgggcgttgctcccggacactgaggactggccccggggtctcgctcaccttcagcagcgtccaccgcctgccacagagcgttcgatcgctcgctgcctgagctcctggtgcgcccgcggacgcagcctccagcttcgcggagatggtttccccagacccccaaattatcgtggtggcccccgagaccgaactcgcgtctatgcaagtccaacgcactgaggacggggtaaccattatccagatattttgggtgggccgcaaaggcgagctacttagacgcaccccggtgagctcggccatgcagacaccaatgggaatcccaatggggaagtcgatgctggtgcttctcaccttcttggccttcgcctcgtgctgcattgctgcttaccgccccagtgagaccctgtgcggcggggagctggtggacaccctccagttcgtctgtggggaccgcggcttctacttcagcaggcccgcaagccgtgtgagccgtcgcagccgtggcatcgttgaggagtgctgtttccgcagctgtgacctggccctcctggagacgtactgtgctacccccgccaagtccgagagggacgtgtcgacccctccgaccgtgcttccggacaacttccccagataccccgtgggcaagttcttccaatatgacacctggaagcagtccacccagcgcctgcgcaggggcctgcctgccctcctgcgtgcccgccggggtcacgtgctcgccaaggagctcgaggcgttcagggaggccaaacgtcaccgtcccctgattgctctacccacccaagaccccgcccacgggggcgcccccccagagatggccagcaatcggaagtgagcaaaactgccgcaagtctgcagcccggcgccaccatcctgcagcctcctcctgaccacggacgtttccatcaggttccatcccgaaaatctctcggttccacgtccccctggggcttctcctgacccagtccccgtgccccgcctccccgaaacaggctactctcctcggccccctccatcgggctgaggaagcacagcagcatcttcaaacatgtacaaaatcgattggctttaaacacccttcacataccctccccccaaattatccccaattatccccacacataaaaaatcaaaacattaaactaacccccttcccccccccccacaacaaccctcttaaaactaattggctttttagaaacaccccacaaaagctcagaaattggctttaaaaaaaacaaccaccaaaaaaaatcaattggctaaaaaaaaaaagtattaaaaacgaattggctgagaaacaattggcaaaataaaggaatttggcactccccacccccctctttctcttctcccttggactttgagtcaaattggcctggacttgagtccctgaaccagcaaagagaaaagaaggaccccagaaatcacaggtgggcacgtcgctgctaccgccatctcccttctcacgggaattttcagggtaaactggccatccgaaaatagcaacaacccagactggctcctcactcccttttccatcactaaaaatcacagagcagtcagagggacccagtaagaccaaaggaggggaggacagagcatgaaaaccaaaatccatgcaaatgaaatgtaattggcacgaccctcacccccaaatcttacatctcaattcccatcctaaaaagcactcatactttatgcatccccgcagctacacacacacaacacacagcacacgcatgaacacagcacacacacgagcacagcacacacacaaacgcacagcacacacagcacacagatgagcacacagcacacacacaaacgcacagcacacacacgcacacacatgcacacacagcacacaaacgcacggcacacacacgcacacacatgcacacacagcacacacacaaacgcacagcacacacaaacgcacagcacacacgcacacacagcacacacacgagcacacagcacacaaacgcacagcacacgcacacacatgcacacacagcacacacactagcacacagcacacacacaaagacacagcacacacatgcacacacagcacacacacgcgaacacagcacacacgaacacagcacacacagcacacacacaaacacagcacacacatgcacacagcacacgcacacacagcacacacatgaacacagcacacagcacacacatgcacacacagcacacacgcatgcacagcacacatgaacacagcacacacacaaacacacagcacacacatgcacacacagcacacacactcatgcgcagcacatacatgaacacagctcacagcacacaaacacgcagcacacacgttgcacacgcaagcacccacctgcacacacacatgcgcacacacacgcacacccccacaaaattggatgaaaacaataagcatatctaagcaactacgatatctgtatggatcaggccaaagtcccgctaagattctccaatgttttcatggtctgagccccgctcctgttcccatctccactgcccctcggccctgtctgtgccctgcctctcagaggagggggctcagatggtgcggcctgagtgtgcggccggcggcatttgggatacacccgtagggtgggcggggtgtgtcccaggcctaattccatctttccaccatgacagagatgcccttgtgaggctggcctccttggcgcctgtccccacggcccccgcagcgtgagccacgatgctccccataccccacccattcccgatacaccttacttactgtgtgttggcccagccagagtgaggaaggagtttggccacattggagatggcggtagctgagcagacatgcccccacgagtagcctgactccctggtgtgctcctggaaggaagatcttggggacccccccaccggagcacacctagggatcatctttgcccgtctcctggggaccccccaagaaatgtggagtcctcgggggccgtgcactgatgcggggagtgtgggaagtctggcggttggaggggtgggtggggggcagtgggggctgggcggggggagttctggggtaggaagtggtcccgggagattttggatggaaaagtcaggaggattgacagcagacttgcagaattacatagagaaattaggaacccccaaatttcatgtcaattgatctattccccctctttgtttcttggggcatttttccttttttttttttttttgttttttttttacccctccttagctttatgcgctcagaaaccaaattaaaccccccccccatgtaacaggggggcagtgacaaaagcaagaacgcacgaagccagcctggagaccaccacgtcctgccccccgccatttatcgccctgattggattttgtttttcatctgtccctgttgcttgggttgagttgagggtggagcctcctggggggcactggccactgagcccccttggagaagtcagaggggagtggagaaggccactgtccggcctggcttctggggacagtggctggtccccagaagtcctgagggcggaggggggggttgggcagggtctcctcaggtgtcaggagggtgctcggaggccacaggagggggctcctggctggcctgaggctggccggaggggaaggggctagcaggtgtgtaaacagagggttccatcaggctggggcagggtggccgccttccgcacacttgaggaaccctcccctctccctcggtgacatcttgcccgcccctcagcaccctgccttgtctccaggaggtccgaagctctgtgggacctcttgggggcaaggtggggtgaggccggggagtagggaggtcaggcgggtctgagcccacagagcaggagagctgccaggtctgcccatcgaccaggttgcttgggccccggagcccacgggtctggtgatgccatagcagccaccaccgcggcgcctagggctgcggcagggactcggcctctgggaggtttacctcgcccccacttgtgcccccagctcagcccccctgcacgcagcccgactagcagtctagaggcctgaggcttctgggtcctggtgacggggctggcatgaccccgggggtcgtccatgccagtccgcctcagtcgcagagggtccctcggcaagcgccctgtgagtgggccattcggaacattggacagaagcccaaagagccaaattgtcacaattgtggaacccacattggcctgagatccaaaacgcttcgaggcaccccaaattacctgcccattcgtcaggacacccacccacccagtgttatattctgcctcgccggagtgggtgttcccgggggcacttgccgaccagccccttgcgtccccaggtttgcagctctcccctgggccactaaccatcctggcccgggctgcctgtctgacctccgtgcctagtcgtggctctccatcttgtctcctccccgtgtccccaatgtcttcagtggggggccccctcttgggtcccctcctctgccatcacctgaagacccccacgccaaacactgaatgtcacctgtgcctgccgcctcggtccaccttgcggcccgtgtttgactcaactcaactcctttaacgctaatatttccggcaaaatcccatgcttgggttttgtctttaaccttgtaacgcttgcaatcccaataaagcattaaaagtcatgatcttcaaaaaaaaaaaaaaaaaa

SEQ ID NO: 4268 - DNA, 847 bp, Homo sapiens
  source 1..847: mol_type = genomic DNA
agccctccaggacaggctgcatcagaagaggccatcaagcagatcactgtccttctgccatggccctgtggatgcgcctcctgcccctgctggcgctgctggccctctggggacctgacccagccgcagcctttgtgaaccaacacctgtgcggctcacacctggtggaagctctctacctagtgtgcggggaacgaggcttcttctacacacccaagacccgccgggaggcagaggacctgcaggcctcagctttgtccctctcctcctccacgtcaacctggccagagggtctggacgccacagccagggcaccccctgctttggtggtgactgctaatattggccaggccggcggatcatcgtccaggcagtttcggcagagagccttgggcaccagtgactccccggtcctctttatccactgtccaggagctgcggggactgcgcagggactagagtacaggggccgaagagtcaccaccgagcttgtgtgggaggaggtggattccagcccccagccccagggctctgaatcgctgccagctcagccccctgcccagcctgccccacagcctgagccccagcaggccagagagcccagtcctgaggtgagctgctgtggcctgtggcccaggcgaccccagcgctcccagaactgaggctggcagccagccccagcctcagccccaactgcgaggcagagagggcctgcagggagggatccagcaggtgactcttcaggctgatttgcccatcccagatagaagccgggagtgttctttcaaaggtgtctttaccttagacactcaataaaatggtaacacagtgaaaaaaaaaaaaaaaa

SEQ ID NO: 4269 - DNA, 3626 bp, Homo sapiens
  source 1..3626: mol_type = genomic DNA
attcctagggccgggcgcgggggcggggaggcctggaggatttaacccaggagagccgctggtgggaggcgcggctggcgccgctgcgcgcatgggcctgttcctggcccgcagccgccacctacccagtgaccatgatagtgtttgtcaggttcaactccagccatggtttcccagtggaggtcgattctgacaccagcatcttccagctcaaggaggtggttgctaagcgacagggggttccggctgaccagttgcgtgtgattttcgcagggaaggagctgaggaatgactggactgtgcaggaatttttctttaaatgtggagcacaccccacctctgacaaggaaacatcagtagctttgcacctgatcgcaacaaatagtcggaacatcacttgcattacgtgcacagacgtcaggagccccgtcctggttttccagtgcaactcccgccacgtgatttgcttagactgtttccacttatactgtgtgacaagactcaatgatcggcagtttgttcacgaccctcaacttggctactccctgccttgtgtggctggctgtcccaactccttgattaaagagctccatcacttcaggattctgggagaagagcagtacaaccggtaccagcagtatggtgcagaggagtgtgtcctgcagatggggggcgtgttatgcccccgccctggctgtggagcggggctgctgccggagcctgaccagaggaaagtcacctgcgaagggggcaatggcctgggctgtgggtttgccttctgccgggaatgtaaagaagcgtaccatgaaggggagtgcagtgccgtatttgaagcctcaggaacaactactcaggcctacagagtcgatgaaagagccgccgagcaggctcgttgggaagcagcctccaaagaaaccatcaagaaaaccaccaagccctgtccccgctgccatgtaccagtggaaaaaaatggaggctgcatgcacatgaagtgtccgcagccccagtgcaggctcgagtggtgctggaactgtggctgcgagtggaaccgcgtctgcatgggggaccactggttcgacgtgtagccagggcggccgggcgccccatcgccacatcctgggggagcatacccagtgtctaccttcattttctaattctcttttcaaacacacacacacacgcgcgcgcgcgcacacacactcttcaagtttttttcaaagtccaactacagccaaattgcagaagaaactcctggatccctttcactatgtccatgaaaaacagcagagtaaaattacagaagaagctcctgaatccctttcagtttgtccacacaagacagcagagccatctgcgacaccaccaacaggcgttctcagcctccggatgacacaaataccagagcacagattcaagtgcaatccatgtatctgtatgggtcattctcacctgaattcgagacaggcagaatcagtagctggagagagagttctcacatttaatatcctgccttttaccttcagtaaacaccatgaagatgccattgacaaggtgtttctctgtaaaatgaactgcagtgggttctccaaactagattcatggctttaacagtaatgttcttatttaaattttcagaaagcatctattcccaaagaaccccaggcaatagtcaaaaacatttgtttatccttaagaattccatctatataaatcgcattaatgaaataccaactatgcgtaaatcaacttgtcacaaagtgagaaattatgaaagttaatttgaatgttgaatgtttgaattacagggaagaaatcaagttaatgtactttcattccctttcatgatttgcaactttagaaagaaattgtttttctgaaagtatcaccaaaaaatctatagtttgattctgagtattcattttgcaacttggagattttgctaatacatttggctccactgtaaatttaatagataaagtgcctataaaggaaacacgtttagaaatgatttcaaaatgatattcaatcttaacaaaagtgaacattattaaatcagaatctttaaagaggagcctttccagaactaccaaaatgaagacacgcccgactctctccatcagaagggtttatacccctttggcacaccctctctgtccaatctgcaagtcccagggagctctgcataccaggggttccccaggagagaccttctcttaggacagtaaactcactagaatattccttatgttgacatggattggatttcagttcaatcaaactttcagcttttttttcagccattcacaacacaatcaaaagattaacaacactgcatgcggcaaaccgcatgctcttacccacactacgcagaagagaaagtacaaccactatcttttgttctacctgtattgtctgacttctcaggaagatcgtgaacataactgagggcatgagtctcactagcacatggaggcccttttggatttagagactgtaaattattaaatcggcaacagggcttctctttttagatgtagcactgaaatccttgctggagggaagagaggggatgaactcaagttttccacatcctgggacacctgtccctcttttcctaactgcctaagataacccatttcttccaaccatctgaggacagtcccgtcgtctcagaggccctgcaccggggagagactgggctctgcagcagccacatcagcattcacagcttcatgtggcttcactgtctgaaaatctaccgactccaacatggccccacggtgacaacagacctgtgacaggaagcccaaagctcacatagaaatggtggacagatcaaagtctctatagtaagggaaaaaaagagaggtggcaggcatgagccccctgcacccagtggctcgtgtccatactgagtccagaccctgatcaaggcctgacttagtgtcactggcagtcccactaaattacacttccttacactggcccgatgcgacaaatcaggtggctcccttctgtcacgtggagcacacagtgttttccatcatccatagctttcttcctgatggtgtttgcattattgcgccttcccaatctgcatgctgcgttgggcttgcggtgcctgaacaaggtttgctcccatgagctcaggcaccctaggatcccctgttagactattaggctgtccagcatggtctcctttcccttcttggtggtggtcttttccctttccagaatagaacagtgattcttaaaataagttagagcaggccgggcgcggtggctcatgcctgtaatcccagcactttgggaggccgaggtgggtggatcacgaggtcaggagttcaagaccagcctggccaagatgatgaaaccccgtctctattaaaaatacaaaaattagctgggcgtggtggcaggcacctgtaatcccagcttcctgggaggctgaggcaggagaatcacttgaacccggggggcagaggttgcagtgagccgagatcacgccactgaactccagcctgggcaacagagtgagactctgtctcaaaaaaaaaaaaaaaacaaaaacaaaaaagcaagatcatccactacacatgaacatgaatcacagtattatttgcaca

SEQ ID NO: 4270 - DNA, 3989 bp, Homo sapiens
  source 1..3989: mol_type = genomic DNA
attcctagggccgggcgcgggggcggggaggcctggaggatttaacccaggagagccgctggtgggaggcgcggctggcgccgctgcgcgcatgggcctgttcctggcccgcagccgccacctacccagtgaccatgatagtgtttgtcaggttcaactccagccatggtttcccagtggaggtcgattctgacaccagcatcttccagctcaaggaggtggttgctaagcgacagggggttccggctgaccagttgcgtgtgattttcgcagggaaggagctgaggaatgactggactgtgcagaattgtgacctggatcagcagagcattgttcacattgtgcagagaccgtggagaaaaggtcaagaaatgaatgcaactggaggcgacgaccccagaaacgcggcgggaggctgtgagcgggagccccagagcttgactcgggtggacctcagcagctcagtcctcccaggagactctgtggggctggctgtcattctgcacactgacagcaggaaggactcaccaccagctggaagtccagcaggtagatcaatctacaacagcttttatgtgtattgcaaaggcccctgtcaaagagtgcagccgggaaaactcagggtacagtgcagcacctgcaggcaggcaacgctcaccttgacccaggaatttttctttaaatgtggagcacaccccacctctgacaaggaaacatcagtagctttgcacctgatcgcaacaaatagtcggaacatcacttgcattacgtgcacagacgtcaggagccccgtcctggttttccagtgcaactcccgccacgtgatttgcttagactgtttccacttatactgtgtgacaagactcaatgatcggcagtttgttcacgaccctcaacttggctactccctgccttgtgtggctggctgtcccaactccttgattaaagagctccatcacttcaggattctgggagaagagcagtacaaccggtaccagcagtatggtgcagaggagtgtgtcctgcagatggggggcgtgttatgcccccgccctggctgtggagcggggctgctgccggagcctgaccagaggaaagtcacctgcgaagggggcaatggcctgggctgtgggtttgccttctgccgggaatgtaaagaagcgtaccatgaaggggagtgcagtgccgtatttgaagcctcaggaacaactactcaggcctacagagtcgatgaaagagccgccgagcaggctcgttgggaagcagcctccaaagaaaccatcaagaaaaccaccaagccctgtccccgctgccatgtaccagtggaaaaaaatggaggctgcatgcacatgaagtgtccgcagccccagtgcaggctcgagtggtgctggaactgtggctgcgagtggaaccgcgtctgcatgggggaccactggttcgacgtgtagccagggcggccgggcgccccatcgccacatcctgggggagcatacccagtgtctaccttcattttctaattctcttttcaaacacacacacacacgcgcgcgcgcgcacacacactcttcaagtttttttcaaagtccaactacagccaaattgcagaagaaactcctggatccctttcactatgtccatgaaaaacagcagagtaaaattacagaagaagctcctgaatccctttcagtttgtccacacaagacagcagagccatctgcgacaccaccaacaggcgttctcagcctccggatgacacaaataccagagcacagattcaagtgcaatccatgtatctgtatgggtcattctcacctgaattcgagacaggcagaatcagtagctggagagagagttctcacatttaatatcctgccttttaccttcagtaaacaccatgaagatgccattgacaaggtgtttctctgtaaaatgaactgcagtgggttctccaaactagattcatggctttaacagtaatgttcttatttaaattttcagaaagcatctattcccaaagaaccccaggcaatagtcaaaaacatttgtttatccttaagaattccatctatataaatcgcattaatgaaataccaactatgcgtaaatcaacttgtcacaaagtgagaaattatgaaagttaatttgaatgttgaatgtttgaattacagggaagaaatcaagttaatgtactttcattccctttcatgatttgcaactttagaaagaaattgtttttctgaaagtatcaccaaaaaatctatagtttgattctgagtattcattttgcaacttggagattttgctaatacatttggctccactgtaaatttaatagataaagtgcctataaaggaaacacgtttagaaatgatttcaaaatgatattcaatcttaacaaaagtgaacattattaaatcagaatctttaaagaggagcctttccagaactaccaaaatgaagacacgcccgactctctccatcagaagggtttatacccctttggcacaccctctctgtccaatctgcaagtcccagggagctctgcataccaggggttccccaggagagaccttctcttaggacagtaaactcactagaatattccttatgttgacatggattggatttcagttcaatcaaactttcagcttttttttcagccattcacaacacaatcaaaagattaacaacactgcatgcggcaaaccgcatgctcttacccacactacgcagaagagaaagtacaaccactatcttttgttctacctgtattgtctgacttctcaggaagatcgtgaacataactgagggcatgagtctcactagcacatggaggcccttttggatttagagactgtaaattattaaatcggcaacagggcttctctttttagatgtagcactgaaatccttgctggagggaagagaggggatgaactcaagttttccacatcctgggacacctgtccctcttttcctaactgcctaagataacccatttcttccaaccatctgaggacagtcccgtcgtctcagaggccctgcaccggggagagactgggctctgcagcagccacatcagcattcacagcttcatgtggcttcactgtctgaaaatctaccgactccaacatggccccacggtgacaacagacctgtgacaggaagcccaaagctcacatagaaatggtggacagatcaaagtctctatagtaagggaaaaaaagagaggtggcaggcatgagccccctgcacccagtggctcgtgtccatactgagtccagaccctgatcaaggcctgacttagtgtcactggcagtcccactaaattacacttccttacactggcccgatgcgacaaatcaggtggctcccttctgtcacgtggagcacacagtgttttccatcatccatagctttcttcctgatggtgtttgcattattgcgccttcccaatctgcatgctgcgttgggcttgcggtgcctgaacaaggtttgctcccatgagctcaggcaccctaggatcccctgttagactattaggctgtccagcatggtctcctttcccttcttggtggtggtcttttccctttccagaatagaacagtgattcttaaaataagttagagcaggccgggcgcggtggctcatgcctgtaatcccagcactttgggaggccgaggtgggtggatcacgaggtcaggagttcaagaccagcctggccaagatgatgaaaccccgtctctattaaaaatacaaaaattagctgggcgtggtggcaggcacctgtaatcccagcttcctgggaggctgaggcaggagaatcacttgaacccggggggcagaggttgcagtgagccgagatcacgccactgaactccagcctgggcaacagagtgagactctgtctcaaaaaaaaaaaaaaaacaaaaacaaaaaagcaagatcatccactacacatgaacatgaatcacagtattatttgcaca

SEQ ID NO: 4271 - DNA, 4073 bp, Homo sapiens
  source 1..4073: mol_type = genomic DNA
attcctagggccgggcgcgggggcggggaggcctggaggatttaacccaggagagccgctggtgggaggcgcggctggcgccgctgcgcgcatgggcctgttcctggcccgcagccgccacctacccagtgaccatgatagtgtttgtcaggttcaactccagccatggtttcccagtggaggtcgattctgacaccagcatcttccagctcaaggaggtggttgctaagcgacagggggttccggctgaccagttgcgtgtgattttcgcagggaaggagctgaggaatgactggactgtgcagaattgtgacctggatcagcagagcattgttcacattgtgcagagaccgtggagaaaaggtcaagaaatgaatgcaactggaggcgacgaccccagaaacgcggcgggaggctgtgagcgggagccccagagcttgactcgggtggacctcagcagctcagtcctcccaggagactctgtggggctggctgtcattctgcacactgacagcaggaaggactcaccaccagctggaagtccagcaggtagatcaatctacaacagcttttatgtgtattgcaaaggcccctgtcaaagagtgcagccgggaaaactcagggtacagtgcagcacctgcaggcaggcaacgctcaccttgacccagggtccatcttgctgggatgatgttttaattccaaaccggatgagtggtgaatgccaatccccacactgccctgggactagtgcagaatttttctttaaatgtggagcacaccccacctctgacaaggaaacatcagtagctttgcacctgatcgcaacaaatagtcggaacatcacttgcattacgtgcacagacgtcaggagccccgtcctggttttccagtgcaactcccgccacgtgatttgcttagactgtttccacttatactgtgtgacaagactcaatgatcggcagtttgttcacgaccctcaacttggctactccctgccttgtgtggctggctgtcccaactccttgattaaagagctccatcacttcaggattctgggagaagagcagtacaaccggtaccagcagtatggtgcagaggagtgtgtcctgcagatggggggcgtgttatgcccccgccctggctgtggagcggggctgctgccggagcctgaccagaggaaagtcacctgcgaagggggcaatggcctgggctgtgggtttgccttctgccgggaatgtaaagaagcgtaccatgaaggggagtgcagtgccgtatttgaagcctcaggaacaactactcaggcctacagagtcgatgaaagagccgccgagcaggctcgttgggaagcagcctccaaagaaaccatcaagaaaaccaccaagccctgtccccgctgccatgtaccagtggaaaaaaatggaggctgcatgcacatgaagtgtccgcagccccagtgcaggctcgagtggtgctggaactgtggctgcgagtggaaccgcgtctgcatgggggaccactggttcgacgtgtagccagggcggccgggcgccccatcgccacatcctgggggagcatacccagtgtctaccttcattttctaattctcttttcaaacacacacacacacgcgcgcgcgcgcacacacactcttcaagtttttttcaaagtccaactacagccaaattgcagaagaaactcctggatccctttcactatgtccatgaaaaacagcagagtaaaattacagaagaagctcctgaatccctttcagtttgtccacacaagacagcagagccatctgcgacaccaccaacaggcgttctcagcctccggatgacacaaataccagagcacagattcaagtgcaatccatgtatctgtatgggtcattctcacctgaattcgagacaggcagaatcagtagctggagagagagttctcacatttaatatcctgccttttaccttcagtaaacaccatgaagatgccattgacaaggtgtttctctgtaaaatgaactgcagtgggttctccaaactagattcatggctttaacagtaatgttcttatttaaattttcagaaagcatctattcccaaagaaccccaggcaatagtcaaaaacatttgtttatccttaagaattccatctatataaatcgcattaatgaaataccaactatgcgtaaatcaacttgtcacaaagtgagaaattatgaaagttaatttgaatgttgaatgtttgaattacagggaagaaatcaagttaatgtactttcattccctttcatgatttgcaactttagaaagaaattgtttttctgaaagtatcaccaaaaaatctatagtttgattctgagtattcattttgcaacttggagattttgctaatacatttggctccactgtaaatttaatagataaagtgcctataaaggaaacacgtttagaaatgatttcaaaatgatattcaatcttaacaaaagtgaacattattaaatcagaatctttaaagaggagcctttccagaactaccaaaatgaagacacgcccgactctctccatcagaagggtttatacccctttggcacaccctctctgtccaatctgcaagtcccagggagctctgcataccaggggttccccaggagagaccttctcttaggacagtaaactcactagaatattccttatgttgacatggattggatttcagttcaatcaaactttcagcttttttttcagccattcacaacacaatcaaaagattaacaacactgcatgcggcaaaccgcatgctcttacccacactacgcagaagagaaagtacaaccactatcttttgttctacctgtattgtctgacttctcaggaagatcgtgaacataactgagggcatgagtctcactagcacatggaggcccttttggatttagagactgtaaattattaaatcggcaacagggcttctctttttagatgtagcactgaaatccttgctggagggaagagaggggatgaactcaagttttccacatcctgggacacctgtccctcttttcctaactgcctaagataacccatttcttccaaccatctgaggacagtcccgtcgtctcagaggccctgcaccggggagagactgggctctgcagcagccacatcagcattcacagcttcatgtggcttcactgtctgaaaatctaccgactccaacatggccccacggtgacaacagacctgtgacaggaagcccaaagctcacatagaaatggtggacagatcaaagtctctatagtaagggaaaaaaagagaggtggcaggcatgagccccctgcacccagtggctcgtgtccatactgagtccagaccctgatcaaggcctgacttagtgtcactggcagtcccactaaattacacttccttacactggcccgatgcgacaaatcaggtggctcccttctgtcacgtggagcacacagtgttttccatcatccatagctttcttcctgatggtgtttgcattattgcgccttcccaatctgcatgctgcgttgggcttgcggtgcctgaacaaggtttgctcccatgagctcaggcaccctaggatcccctgttagactattaggctgtccagcatggtctcctttcccttcttggtggtggtcttttccctttccagaatagaacagtgattcttaaaataagttagagcaggccgggcgcggtggctcatgcctgtaatcccagcactttgggaggccgaggtgggtggatcacgaggtcaggagttcaagaccagcctggccaagatgatgaaaccccgtctctattaaaaatacaaaaattagctgggcgtggtggcaggcacctgtaatcccagcttcctgggaggctgaggcaggagaatcacttgaacccggggggcagaggttgcagtgagccgagatcacgccactgaactccagcctgggcaacagagtgagactctgtctcaaaaaaaaaaaaaaaacaaaaacaaaaaagcaagatcatccactacacatgaacatgaatcacagtattatttgcaca

SEQ ID NO: 4272 - DNA, 2133 bp, Homo sapiens
  source 1..2133: mol_type = genomic DNA
cgggccaatcgttagtcagagtgggcggagccgcccgcgggcacctgcgcgttaagagtgggccgcgtcgctgaggggtagcgatgcgggctccggggatgaggtcgcggccggcgggtcccgcgctgttgctgctgctgctcttcctcggagcggccgagtcggtgcgtcgggcccagcctccgcgccgctacaccccagactggccgagcctggattctcggccgctgccggcctggttcgacgaagccaagttcggggtgttcatccactggggcgtgttctcggtgcccgcctggggcagcgagtggttctggtggcactggcagggcgaggggcggccgcagtaccagcgcttcatgcgcgacaactacccgcccggcttcagctacgccgacttcggaccgcagttcactgcgcgcttcttccacccggaggagtgggccgacctcttccaggccgcgggcgccaagtatgtagttttgacgacaaagcatcacgaaggcttcacaaactggccgagtcctgtgtcttggaactggaactccaaagacgtggggcctcatcgggatttggttggtgaattgggaacagctctccggaagaggaacatccgctatggactataccactcactcttagagtggttccatccactctatctacttgataagaaaaatggcttcaaaacacagcattttgtcagtgcaaaaacaatgccagagctgtacgaccttgttaacagctataaacctgatctgatctggtctgatggggagtgggaatgtcctgatacttactggaactccacaaattttctttcatggctctacaatgacagccctgtcaaggatgaggtggtagtaaatgaccgatggggtcagaactgttcctgtcaccatggaggatactataactgtgaagataaattcaagccacagagcttgccagatcacaagtgggagatgtgcaccagcattgacaagttttcctggggctatcgtcgtgacatggcattgtctgatgttacagaagaatctgaaatcatttcggaactggttcagacagtaagtttgggaggcaactatcttctgaacattggaccaactaaagatggactgattgttcccatcttccaagaaaggcttcttgctgttgggaaatggctgagcatcaatggggaggctatctatgcctccaaaccatggcgggtgcaatgggaaaagaacacaacatctgtatggtatacctcaaagggatcggctgtttatgccatttttctgcactggccagaaaatggagtcttaaaccttgaatcccccataactacctcaactacaaagataacaatgctgggaattcaaggagatctgaagtggtccacagatccagataaaggtctcttcatctctctaccccagttgccaccctctgctgtccccgcagagtttgcttggactataaagctgacaggagtgaagtaatcatttgagtgcaagaagaaagaggcgctgctcactgttttcctgcttcagtttttctcttatagtaccatcactataatcaacgaacttctcttctccacccagagatggcttttccaacacattttaattaaaggaactgagtacattaccctgatgtctaaatggaccaaagatctgagatccattgtgattatatctgtatcaggtcagcagaagaaggaactgagcagttgaactctgagttcatcaattgtaatatttggaaattatctacaatggaatcttccctctgttctctgataacctacttgcttactcaatgcctttaagccaagtcaccctgttgcctatgggaggaggtggaaggatttggcaagctcaaccacatgctatttagttagcatcagttgtcaccaacagtctttctgcaaagggcaggagagctttgggggaaaggaaaaggcttaccaggctgctatggtcaactcttcagaaattttcagagcaatctaaaagcgccaaaattcgctatgtttacagtgatactattaagaaaatgaatgtgattctgctctgtctttttaagtatgatcaaataaaaaatttgtacatcacaatcatttctaccaaaaaaaaaaaaaaaaaa

SEQ ID NO: 4273 - DNA, 4110 bp, Homo sapiens
  source 1..4110: mol_type = genomic DNA
gtcgagcgggagcagaggaggcgagggaggagggccagagaggcagttggaagatggcggacgaggcggccctcgcccttcagcccggcggctccccctcggcggcgggggccgacagggaggccgcgtcgtcccccgccggggagccgctccgcaagaggccgcggagagatggtcccggcctcgagcggagcccgggcgagcccggtggggcggccccagagcgtgaggtgccggcggcggccaggggctgcccgggtgcggcggcggcggcgctgtggcgggaggcggaggcagaggcggcggcggcaggcggggagcaagaggcccaggcgactgcggcggctggggaaggagacaatgggccgggcctgcagggcccatctcgggagccaccgctggccgacaacttgtacgacgaagacgacgacgacgagggcgaggaggaggaagaggcggcggcggcggcgattgggtaccgagataaccttctgttcggtgatgaaattatcactaatggttttcattcctgtgaaagtgatgaggaggatagagcctcacatgcaagctctagtgactggactccaaggccacggataggtccatatacttttgttcagcaacatcttatgattggcacagatcctcgaacaattcttaaagatttattgccggaaacaatacctccacctgagttggatgatatgacactgtggcagattgttattaatatcctttcagaaccaccaaaaaggaaaaaaagaaaagatattaatacaattgaagatgctgtgaaattactgcaagagtgcaaaaaaattatagttctaactggagctggggtgtctgtttcatgtggaatacctgacttcaggtcaagggatggtatttatgctcgccttgctgtagacttcccagatcttccagatcctcaagcgatgtttgatattgaatatttcagaaaagatccaagaccattcttcaagtttgcaaaggaaatatatcctggacaattccagccatctctctgtcacaaattcatagccttgtcagataaggaaggaaaactacttcgcaactatacccagaacatagacacgctggaacaggttgcgggaatccaaaggataattcagtgtcatggttcctttgcaacagcatcttgcctgatttgtaaatacaaagttgactgtgaagctgtacgaggagatatttttaatcaggtagttcctcgatgtcctaggtgcccagctgatgaaccgcttgctatcatgaaaccagagattgtgttttttggtgaaaatttaccagaacagtttcatagagccatgaagtatgacaaagatgaagttgacctcctcattgttattgggtcttccctcaaagtaagaccagtagcactaattccaagttccataccccatgaagtgcctcagatattaattaatagagaacctttgcctcatctgcattttgatgtagagcttcttggagactgtgatgtcataattaatgaattgtgtcataggttaggtggtgaatatgccaaactttgctgtaaccctgtaaagctttcagaaattactgaaaaacctccacgaacacaaaaagaattggcttatttgtcagagttgccacccacacctcttcatgtttcagaagactcaagttcaccagaaagaacttcaccaccagattcttcagtgattgtcacacttttagaccaagcagctaagagtaatgatgatttagatgtgtctgaatcaaaaggttgtatggaagaaaaaccacaggaagtacaaacttctaggaatgttgaaagtattgctgaacagatggaaaatccggatttgaagaatgttggttctagtactggggagaaaaatgaaagaacttcagtggctggaacagtgagaaaatgctggcctaatagagtggcaaaggagcagattagtaggcggcttgatggtaatcagtatctgtttttgccaccaaatcgttacattttccatggcgctgaggtatattcagactctgaagatgacgtcttatcctctagttcttgtggcagtaacagtgatagtgggacatgccagagtccaagtttagaagaacccatggaggatgaaagtgaaattgaagaattctacaatggcttagaagatgagcctgatgttccagagagagctggaggagctggatttgggactgatggagatgatcaagaggcaattaatgaagctatatctgtgaaacaggaagtaacagacatgaactatccatcaaacaaatcatagtgtaataattgtgcaggtacaggaattgttccaccagcattaggaactttagcatgtcaaaatgaatgtttacttgtgaactcgatagagcaaggaaaccagaaaggtgtaatatttataggttggtaaaatagattgtttttcatggataatttttaacttcattatttctgtacttgtacaaactcaacactaacttttttttttttaaaaaaaaaaaggtactaagtatcttcaatcagctgttggtcaagactaactttcttttaaaggttcatttgtatgataaattcatatgtgtatatataattttttttgttttgtctagtgagtttcaacatttttaaagttttcaaaaagccatcggaatgttaaattaatgtaaagggaacagctaatctagaccaaagaatggtattttcacttttctttgtaacattgaatggtttgaagtactcaaaatctgttacgctaaacttttgattctttaacacaattatttttaaacactggcattttccaaaactgtggcagctaactttttaaaatctcaaatgacatgcagtgtgagtagaaggaagtcaacaatatgtggggagagcactcggttgtctttacttttaaaagtaatacttggtgctaagaatttcaggattattgtatttacgttcaaatgaagatggcttttgtacttcctgtggacatgtagtaatgtctatattggctcataaaactaacctgaaaaacaaataaatgctttggaaatgtttcagttgctttagaaacattagtgcctgcctggatccccttagttttgaaatatttgccattgttgtttaaatacctatcactgtggtagagcttgcattgatcttttccacaagtattaaactgccaaaatgtgaatatgcaaagcctttctgaatctataataatggtacttctactggggagagtgtaatattttggactgctgttttccattaatgaggagagcaacaggcccctgattatacagttccaaagtaataagatgttaattgtaattcagccagaaagtacatgtctcccattgggaggatttggtgttaaataccaaactgctagccctagtattatggagatgaacatgatgatgtaacttgtaatagcagaatagttaatgaatgaaactagttcttataatttatctttatttaaaagcttagcctgccttaaaactagagatcaactttctcagctgcaaaagcttctagtctttcaagaagttcatactttatgaaattgcacagtaagcatttatttttcagaccatttttgaacatcactcctaaattaataaagtattcctctgttgctttagtatttattacaataaaaagggtttgaaatatagctgttctttatgcataaaacacccagctaggaccattactgccagagaaaaaaatcgtattgaatggccatttccctacttataagatgtctcaatctgaatttatttggctacactaaagaatgcagtatatttagttttccatttgcatgatgtttgtgtgctatagatgatattttaaattgaaaagtttgttttaaattatttttacagtgaagactgttttcagctctttttatattgtacatagtcttttatgtaatttactggcatatgttttgtagactgtttaatgactggatatcttccttcaacttttgaaatacaaaaccagtgttttttacttgtacactgttttaaagtctattaaaattgtcatttgacttttttctgttaacttaaaaaaaaaaaaaaaaa

SEQ ID NO: 4274 - DNA, 3604 bp, Homo sapiens
  source 1..3604: mol_type = genomic DNA
gcatctcctcctccctctccccgggctcctactggcctgaggttgagggcggctgggggctcggggcaggctccgcggcgttcccctccccaccccggccctccgttcagccgcgctcctccggggctgcggttcctactgcgcgagctgccagtggattcgctcttttcctccgtccgtggcccgcctgggcggccttgttctttccgcagcagccagataaccttctgttcggtgatgaaattatcactaatggttttcattcctgtgaaagtgatgaggaggatagagcctcacatgcaagctctagtgactggactccaaggccacggataggtgtctgtttcatgtggaatacctgacttcaggtcaagggatggtatttatgctcgccttgctgtagacttcccagatcttccagatcctcaagcgatgtttgatattgaatatttcagaaaagatccaagaccattcttcaagtttgcaaaggaaatatatcctggacaattccagccatctctctgtcacaaattcatagccttgtcagataaggaaggaaaactacttcgcaactatacccagaacatagacacgctggaacaggttgcgggaatccaaaggataattcagtgtcatggttcctttgcaacagcatcttgcctgatttgtaaatacaaagttgactgtgaagctgtacgaggagatatttttaatcaggtagttcctcgatgtcctaggtgcccagctgatgaaccgcttgctatcatgaaaccagagattgtgttttttggtgaaaatttaccagaacagtttcatagagccatgaagtatgacaaagatgaagttgacctcctcattgttattgggtcttccctcaaagtaagaccagtagcactaattccaagttccataccccatgaagtgcctcagatattaattaatagagaacctttgcctcatctgcattttgatgtagagcttcttggagactgtgatgtcataattaatgaattgtgtcataggttaggtggtgaatatgccaaactttgctgtaaccctgtaaagctttcagaaattactgaaaaacctccacgaacacaaaaagaattggcttatttgtcagagttgccacccacacctcttcatgtttcagaagactcaagttcaccagaaagaacttcaccaccagattcttcagtgattgtcacacttttagaccaagcagctaagagtaatgatgatttagatgtgtctgaatcaaaaggttgtatggaagaaaaaccacaggaagtacaaacttctaggaatgttgaaagtattgctgaacagatggaaaatccggatttgaagaatgttggttctagtactggggagaaaaatgaaagaacttcagtggctggaacagtgagaaaatgctggcctaatagagtggcaaaggagcagattagtaggcggcttgatggtaatcagtatctgtttttgccaccaaatcgttacattttccatggcgctgaggtatattcagactctgaagatgacgtcttatcctctagttcttgtggcagtaacagtgatagtgggacatgccagagtccaagtttagaagaacccatggaggatgaaagtgaaattgaagaattctacaatggcttagaagatgagcctgatgttccagagagagctggaggagctggatttgggactgatggagatgatcaagaggcaattaatgaagctatatctgtgaaacaggaagtaacagacatgaactatccatcaaacaaatcatagtgtaataattgtgcaggtacaggaattgttccaccagcattaggaactttagcatgtcaaaatgaatgtttacttgtgaactcgatagagcaaggaaaccagaaaggtgtaatatttataggttggtaaaatagattgtttttcatggataatttttaacttcattatttctgtacttgtacaaactcaacactaacttttttttttttaaaaaaaaaaaggtactaagtatcttcaatcagctgttggtcaagactaactttcttttaaaggttcatttgtatgataaattcatatgtgtatatataattttttttgttttgtctagtgagtttcaacatttttaaagttttcaaaaagccatcggaatgttaaattaatgtaaagggaacagctaatctagaccaaagaatggtattttcacttttctttgtaacattgaatggtttgaagtactcaaaatctgttacgctaaacttttgattctttaacacaattatttttaaacactggcattttccaaaactgtggcagctaactttttaaaatctcaaatgacatgcagtgtgagtagaaggaagtcaacaatatgtggggagagcactcggttgtctttacttttaaaagtaatacttggtgctaagaatttcaggattattgtatttacgttcaaatgaagatggcttttgtacttcctgtggacatgtagtaatgtctatattggctcataaaactaacctgaaaaacaaataaatgctttggaaatgtttcagttgctttagaaacattagtgcctgcctggatccccttagttttgaaatatttgccattgttgtttaaatacctatcactgtggtagagcttgcattgatcttttccacaagtattaaactgccaaaatgtgaatatgcaaagcctttctgaatctataataatggtacttctactggggagagtgtaatattttggactgctgttttccattaatgaggagagcaacaggcccctgattatacagttccaaagtaataagatgttaattgtaattcagccagaaagtacatgtctcccattgggaggatttggtgttaaataccaaactgctagccctagtattatggagatgaacatgatgatgtaacttgtaatagcagaatagttaatgaatgaaactagttcttataatttatctttatttaaaagcttagcctgccttaaaactagagatcaactttctcagctgcaaaagcttctagtctttcaagaagttcatactttatgaaattgcacagtaagcatttatttttcagaccatttttgaacatcactcctaaattaataaagtattcctctgttgctttagtatttattacaataaaaagggtttgaaatatagctgttctttatgcataaaacacccagctaggaccattactgccagagaaaaaaatcgtattgaatggccatttccctacttataagatgtctcaatctgaatttatttggctacactaaagaatgcagtatatttagttttccatttgcatgatgtttgtgtgctatagatgatattttaaattgaaaagtttgttttaaattatttttacagtgaagactgttttcagctctttttatattgtacatagtcttttatgtaatttactggcatatgttttgtagactgtttaatgactggatatcttccttcaacttttgaaatacaaaaccagtgttttttacttgtacactgttttaaagtctattaaaattgtcatttgacttttttctgttaacttaaaaaaaaaaaaaaaaa

SEQ ID NO: 4275 - DNA, 979 bp, Homo sapiens
  source 1..979: mol_type = genomic DNA
tgagtctgcgcagtgtggggctgagggaggccggacggcgcgcgtgcgtgctggcgtgcgttcattttcagcctggtgtggggtgagtggtacccaacgggccggggcgccgcgtccgcaggaagaggcgcggggtgcaggcttgtaaacatataacataaaaatggcttccaaaagagctctggtcatcctggctaaaggagcagaggaaatggagacggtcatccctgtagatgtcatgaggcgagctgggattaaggtcaccgttgcaggcctggctggaaaagacccagtacagtgtagccgtgatgtggtcatttgtcctgatgccagccttgaagatgcaaaaaaagagggaccatatgatgtggtggttctaccaggaggtaatctgggcgcacagaatttatctgagtctgctgctgtgaaggagatactgaaggagcaggaaaaccggaagggcctgatagccgccatctgtgcaggtcctactgctctgttggctcatgaaataggttttggaagtaaagttacaacacaccctcttgctaaagacaaaatgatgaatggaggtcattacacctactctgagaatcgtgtggaaaaagacggcctgattcttacaagccgggggcctgggaccagcttcgagtttgcgcttgcaattgttgaagccctgaatggcaaggaggtggcggctcaagtgaaggctccacttgttcttaaagactagagcagcgaactgcgacgatcacttagagaaacaggccgttaggaatccattctcactgtgttcgctctaaacaaaacagtggtaggttaatgtgttcagaagtcgctgtccttactacttttgcggaagtatggaagtcacaactacacagagatttctcagcctacaaattgtgtctatacatttctaagccttgtttgcagaataaacagggcatttagcaaactaaaaaaaaaaaaaaaaaaa

SEQ ID NO: 4276 - DNA, 921 bp, Homo sapiens
  source 1..921: mol_type = genomic DNA
tgagtctgcgcagtgtggggctgagggaggccggacggcgcgcgtgcgtgctggcgtgcgttcattttcagcctggtgtggggcttgtaaacatataacataaaaatggcttccaaaagagctctggtcatcctggctaaaggagcagaggaaatggagacggtcatccctgtagatgtcatgaggcgagctgggattaaggtcaccgttgcaggcctggctggaaaagacccagtacagtgtagccgtgatgtggtcatttgtcctgatgccagccttgaagatgcaaaaaaagagggaccatatgatgtggtggttctaccaggaggtaatctgggcgcacagaatttatctgagtctgctgctgtgaaggagatactgaaggagcaggaaaaccggaagggcctgatagccgccatctgtgcaggtcctactgctctgttggctcatgaaataggttttggaagtaaagttacaacacaccctcttgctaaagacaaaatgatgaatggaggtcattacacctactctgagaatcgtgtggaaaaagacggcctgattcttacaagccgggggcctgggaccagcttcgagtttgcgcttgcaattgttgaagccctgaatggcaaggaggtggcggctcaagtgaaggctccacttgttcttaaagactagagcagcgaactgcgacgatcacttagagaaacaggccgttaggaatccattctcactgtgttcgctctaaacaaaacagtggtaggttaatgtgttcagaagtcgctgtccttactacttttgcggaagtatggaagtcacaactacacagagatttctcagcctacaaattgtgtctatacatttctaagccttgtttgcagaataaacagggcatttagcaaactaaaaaaaaaaaaaaaaaaa

SEQ ID NO: 4277 - DNA, 1563 bp, Homo sapiens
  source 1..1563: mol_type = genomic DNA
gctcagcatttggggacgctctcagctctcggcgcacggcccagcttccttcaaaatgtctactgttcacgaaatcctgtgcaagctcagcttggagggtgatcactctacacccccaagtgcatatgggtctgtcaaagcctatactaactttgatgctgagcgggatgctttgaacattgaaacagccatcaagaccaaaggtgtggatgaggtcaccattgtcaacattttgaccaaccgcagcaatgcacagagacaggatattgccttcgcctaccagagaaggaccaaaaaggaacttgcatcagcactgaagtcagccttatctggccacctggagacggtgattttgggcctattgaagacacctgctcagtatgacgcttctgagctaaaagcttccatgaaggggctgggaaccgacgaggactctctcattgagatcatctgctccagaaccaaccaggagctgcaggaaattaacagagtctacaaggaaatgtacaagactgatctggagaaggacattatttcggacacatctggtgacttccgcaagctgatggttgccctggcaaagggtagaagagcagaggatggctctgtcattgattatgaactgattgaccaagatgctcgggatctctatgacgctggagtgaagaggaaaggaactgatgttcccaagtggatcagcatcatgaccgagcggagcgtgccccacctccagaaagtatttgataggtacaagagttacagcccttatgacatgttggaaagcatcaggaaagaggttaaaggagacctggaaaatgctttcctgaacctggttcagtgcattcagaacaagcccctgtattttgctgatcggctgtatgactccatgaagggcaaggggacgcgagataaggtcctgatcagaatcatggtctcccgcagtgaagtggacatgttgaaaattaggtctgaattcaagagaaagtacggcaagtccctgtactattatatccagcaagacactaagggcgactaccagaaagcgctgctgtacctgtgtggtggagatgactgaagcccgacacggcctgagcgtccagaaatggtgctcaccatgcttccagctaacaggtctagaaaaccagcttgcgaataacagtccccgtggccatccctgtgagggtgacgttagcattacccccaacctcattttagttgcctaagcattgcctggccttcctgtctagtctctcctgtaagccaaagaaatgaacattccaaggagttggaagtgaagtctatgatgtgaaacactttgcctcctgtgtactgtgtcataaacagatgaataaactgaatttgtactttagaaacacgtactttgtggccctgctttcaactgaattgtttgaaaattaaacgtgcttggggttcagctggtgaggctgtccctgtaggaagaaagctctgggactgagctgtacagtatggttgcccctatccaagtgtcgctatttaagttaaatttaaatgaaataaaataaaataaaatcaaaaaaaaaa

SEQ ID NO: 4278 - DNA, 1665 bp, Homo sapiens
  source 1..1665: mol_type = genomic DNA
gctcagcatttggggacgctctcagctctcggcgcacggcccagggtgaaaatgtttgccattaaactcacatgaagtaggaaatatttatatggatacaaaaggcacctgcatgggataatgtcaaatttcatagatactgctttgtgcttccttcaaaatgtctactgttcacgaaatcctgtgcaagctcagcttggagggtgatcactctacacccccaagtgcatatgggtctgtcaaagcctatactaactttgatgctgagcgggatgctttgaacattgaaacagccatcaagaccaaaggtgtggatgaggtcaccattgtcaacattttgaccaaccgcagcaatgcacagagacaggatattgccttcgcctaccagagaaggaccaaaaaggaacttgcatcagcactgaagtcagccttatctggccacctggagacggtgattttgggcctattgaagacacctgctcagtatgacgcttctgagctaaaagcttccatgaaggggctgggaaccgacgaggactctctcattgagatcatctgctccagaaccaaccaggagctgcaggaaattaacagagtctacaaggaaatgtacaagactgatctggagaaggacattatttcggacacatctggtgacttccgcaagctgatggttgccctggcaaagggtagaagagcagaggatggctctgtcattgattatgaactgattgaccaagatgctcgggatctctatgacgctggagtgaagaggaaaggaactgatgttcccaagtggatcagcatcatgaccgagcggagcgtgccccacctccagaaagtatttgataggtacaagagttacagcccttatgacatgttggaaagcatcaggaaagaggttaaaggagacctggaaaatgctttcctgaacctggttcagtgcattcagaacaagcccctgtattttgctgatcggctgtatgactccatgaagggcaaggggacgcgagataaggtcctgatcagaatcatggtctcccgcagtgaagtggacatgttgaaaattaggtctgaattcaagagaaagtacggcaagtccctgtactattatatccagcaagacactaagggcgactaccagaaagcgctgctgtacctgtgtggtggagatgactgaagcccgacacggcctgagcgtccagaaatggtgctcaccatgcttccagctaacaggtctagaaaaccagcttgcgaataacagtccccgtggccatccctgtgagggtgacgttagcattacccccaacctcattttagttgcctaagcattgcctggccttcctgtctagtctctcctgtaagccaaagaaatgaacattccaaggagttggaagtgaagtctatgatgtgaaacactttgcctcctgtgtactgtgtcataaacagatgaataaactgaatttgtactttagaaacacgtactttgtggccctgctttcaactgaattgtttgaaaattaaacgtgcttggggttcagctggtgaggctgtccctgtaggaagaaagctctgggactgagctgtacagtatggttgcccctatccaagtgtcgctatttaagttaaatttaaatgaaataaaataaaataaaatcaaaaaaa

SEQ ID NO: 4279 - DNA, 1632 bp, Homo sapiens
  source 1..1632: mol_type = genomic DNA
gctcagcatttggggacgctctcagctctcggcgcacggcccaggtaagcggggcgcgccctgcccgcccgcgatgggccgccagctagcggggtgtggagacgctgggaagaaggcttccttcaaaatgtctactgttcacgaaatcctgtgcaagctcagcttggagggtgatcactctacacccccaagtgcatatgggtctgtcaaagcctatactaactttgatgctgagcgggatgctttgaacattgaaacagccatcaagaccaaaggtgtggatgaggtcaccattgtcaacattttgaccaaccgcagcaatgcacagagacaggatattgccttcgcctaccagagaaggaccaaaaaggaacttgcatcagcactgaagtcagccttatctggccacctggagacggtgattttgggcctattgaagacacctgctcagtatgacgcttctgagctaaaagcttccatgaaggggctgggaaccgacgaggactctctcattgagatcatctgctccagaaccaaccaggagctgcaggaaattaacagagtctacaaggaaatgtacaagactgatctggagaaggacattatttcggacacatctggtgacttccgcaagctgatggttgccctggcaaagggtagaagagcagaggatggctctgtcattgattatgaactgattgaccaagatgctcgggatctctatgacgctggagtgaagaggaaaggaactgatgttcccaagtggatcagcatcatgaccgagcggagcgtgccccacctccagaaagtatttgataggtacaagagttacagcccttatgacatgttggaaagcatcaggaaagaggttaaaggagacctggaaaatgctttcctgaacctggttcagtgcattcagaacaagcccctgtattttgctgatcggctgtatgactccatgaagggcaaggggacgcgagataaggtcctgatcagaatcatggtctcccgcagtgaagtggacatgttgaaaattaggtctgaattcaagagaaagtacggcaagtccctgtactattatatccagcaagacactaagggcgactaccagaaagcgctgctgtacctgtgtggtggagatgactgaagcccgacacggcctgagcgtccagaaatggtgctcaccatgcttccagctaacaggtctagaaaaccagcttgcgaataacagtccccgtggccatccctgtgagggtgacgttagcattacccccaacctcattttagttgcctaagcattgcctggccttcctgtctagtctctcctgtaagccaaagaaatgaacattccaaggagttggaagtgaagtctatgatgtgaaacactttgcctcctgtgtactgtgtcataaacagatgaataaactgaatttgtactttagaaacacgtactttgtggccctgctttcaactgaattgtttgaaaattaaacgtgcttggggttcagctggtgaggctgtccctgtaggaagaaagctctgggactgagctgtacagtatggttgcccctatccaagtgtcgctatttaagttaaatttaaatgaaataaaataaaataaaatcaaaaaaa

SEQ ID NO: 4280 - DNA, 1644 bp, Homo sapiens
  source 1..1644: mol_type = genomic DNA
gctcagcatttggggacgctctcagctctcggcgcacggcccaggttatcttgtagcatagcaacttcggatttcactctacccggagagtttcccgcttggttgaacacattggcctcaggaagcttccttcaaaatgtctactgttcacgaaatcctgtgcaagctcagcttggagggtgatcactctacacccccaagtgcatatgggtctgtcaaagcctatactaactttgatgctgagcgggatgctttgaacattgaaacagccatcaagaccaaaggtgtggatgaggtcaccattgtcaacattttgaccaaccgcagcaatgcacagagacaggatattgccttcgcctaccagagaaggaccaaaaaggaacttgcatcagcactgaagtcagccttatctggccacctggagacggtgattttgggcctattgaagacacctgctcagtatgacgcttctgagctaaaagcttccatgaaggggctgggaaccgacgaggactctctcattgagatcatctgctccagaaccaaccaggagctgcaggaaattaacagagtctacaaggaaatgtacaagactgatctggagaaggacattatttcggacacatctggtgacttccgcaagctgatggttgccctggcaaagggtagaagagcagaggatggctctgtcattgattatgaactgattgaccaagatgctcgggatctctatgacgctggagtgaagaggaaaggaactgatgttcccaagtggatcagcatcatgaccgagcggagcgtgccccacctccagaaagtatttgataggtacaagagttacagcccttatgacatgttggaaagcatcaggaaagaggttaaaggagacctggaaaatgctttcctgaacctggttcagtgcattcagaacaagcccctgtattttgctgatcggctgtatgactccatgaagggcaaggggacgcgagataaggtcctgatcagaatcatggtctcccgcagtgaagtggacatgttgaaaattaggtctgaattcaagagaaagtacggcaagtccctgtactattatatccagcaagacactaagggcgactaccagaaagcgctgctgtacctgtgtggtggagatgactgaagcccgacacggcctgagcgtccagaaatggtgctcaccatgcttccagctaacaggtctagaaaaccagcttgcgaataacagtccccgtggccatccctgtgagggtgacgttagcattacccccaacctcattttagttgcctaagcattgcctggccttcctgtctagtctctcctgtaagccaaagaaatgaacattccaaggagttggaagtgaagtctatgatgtgaaacactttgcctcctgtgtactgtgtcataaacagatgaataaactgaatttgtactttagaaacacgtactttgtggccctgctttcaactgaattgtttgaaaattaaacgtgcttggggttcagctggtgaggctgtccctgtaggaagaaagctctgggactgagctgtacagtatggttgcccctatccaagtgtcgctatttaagttaaatttaaatgaaataaaataaaataaaatcaaaaaaaaaa

SEQ ID NO: 4281 - DNA, 1294 bp, Homo sapiens
  source 1..1294: mol_type = genomic DNA
gcatagaatgcagatgagcaaagtgagtgggagagggaagtcatttgtaacaaaaactcattatttacagatgagaaatttatattgtcagcgtaatatctgtgaggctaaacagagctggagagtatataaaagcagtgcgccttggtgcagaagtacagagcttaggacacagagcacatcaaaagttcccaaagagggcttgctctctcttcacctgctctgttctacagcacactaccagaagacagcagaaatgaaaagcatttactttgtggctggattatttgtaatgctggtacaaggcagctggcaacgttcccttcaagacacagaggagaaatccagatcattctcagcttcccaggcagacccactcagtgatcctgatcagatgaacgaggacaagcgccattcacagggcacattcaccagtgactacagcaagtatctggactccaggcgtgcccaagattttgtgcagtggttgatgaataccaagaggaacaggaataacattgccaaacgtcacgatgaatttgagagacatgctgaagggacctttaccagtgatgtaagttcttatttggaaggccaagctgccaaggaattcattgcttggctggtgaaaggccgaggaaggcgagatttcccagaagaggtcgccattgttgaagaacttggccgcagacatgctgatggttctttctctgatgagatgaacaccattcttgataatcttgccgccagggactttataaactggttgattcagaccaaaatcactgacaggaaataactatatcactattcaagatcatcttcacaacatcacctgctagccacgtgggatgtttgaaatgttaagtcctgtaaatttaagaggtgtattctgaggccacattgctttgcatgccaataaataaattttcttttagtgttgtgtagccaaaaattacaaatggaataaagttttatcaaaatattgctaaaatatcagctttaaaatatgaaagtgctagattctgttattttcttcttattttggatgaagtaccccaacctgtttacatttagcgataaaattatttttctatgatataatttgtaaatgtaaattattccgatctgacatatctgcattataataataggagaatagaagaactggtagccacagtggtgaaattggaaagagaactttcttcctgaaacctttgtcttaaaaatactcagctttcaatgtatcaaagatacaattaaataaaattttcaagcttctttaccattgtct

SEQ ID NO: 4282 - DNA, 3444 bp, Homo sapiens
  source 1..3444: mol_type = genomic DNA
gtaggaatcgcagcgccagcggttgcaaggcccaagaagcccatcctgggaaggaaaatgcattggggaaccctgtgcggattcttgtggctttggccctatcttttctatgtccaagctgtgcccatccaaaaagtccaagatgacaccaaaaccctcatcaagacaattgtcaccaggatcaatgacatttcacacacgcagtcagtctcctccaaacagaaagtcaccggtttggacttcattcctgggctccaccccatcctgaccttatccaagatggaccagacactggcagtctaccaacagatcctcaccagtatgccttccagaaacgtgatccaaatatccaacgacctggagaacctccgggatcttcttcacgtgctggccttctctaagagctgccacttgccctgggccagtggcctggagaccttggacagcctggggggtgtcctggaagcttcaggctactccacagaggtggtggccctgagcaggctgcaggggtctctgcaggacatgctgtggcagctggacctcagccctgggtgctgaggccttgaaggtcactcttcctgcaaggactacgttaagggaaggaactctggcttccaggtatctccaggattgaagagcattgcatggacaccccttatccaggactctgtcaatttccctgactcctctaagccactcttccaaaggcataagaccctaagcctccttttgcttgaaaccaaagatatatacacaggatcctattctcaccaggaagggggtccacccagcaaagagtgggctgcatctgggattcccaccaaggtcttcagccatcaacaagagttgtcttgtcccctcttgacccatctccccctcactgaatgcctcaatgtgaccaggggtgatttcagagagggcagaggggtaggcagagcctttggatgaccagaacaaggttccctctgagaattccaaggagttccatgaagaccacatccacacacgcaggaactcccagcaacacaagctggaagcacatgtttatttattctgcattttattctggatggatttgaagcaaagcaccagcttctccaggctctttggggtcagccagggccaggggtctccctggagtgcagtttccaatcccatagatgggtctggctgagctgaacccattttgagtgactcgagggttgggttcatctgagcaagagctggcaaaggtggctctccagttagttctctcgtaactggtttcatttctactgtgactgatgttacatcacagtgtttgcaatggtgttgccctgagtggatctccaaggaccaggttattttaaaaagatttgttttgtcaagtgtcatatgtaggtgtctgcacccaggggtggggaatgtttgggcagaagggagaaggatctagaatgtgttttctgaataacatttgtgtggtgggttctttggaaggagtgagatcattttcttatcttctgcaattgcttaggatgtttttcatgaaaatagctctttcaggggggttgtgaggcctggccaggcaccccctggagagaagtttctggccctggctgaccccaaagagcctggagaagctgatgctttgcttcaaatccatccagaataaaacgcaaagggctgaaagccatttgttggggcagtggtaagctctggctttctccgactgctagggagtggtctttcctatcatggagtgacggtcccacactggtgactgcgatcttcagagcaggggtccttggtgtgaccctctgaatggtccagggttgatcacactctgggtttattacatggcagtgttcctatttggggcttgcatgccaaattgtagttcttgtctgattggctcacccaagcaaggccaaaattaccaaaaatcttggggggtttttactccagtggtgaagaaaactcctttagcaggtggtcctgagacctgacaagcactgctaggcgagtgccaggactccccaggccaggccaccaggatggcccttcccactggaggtcacattcaggaagatgaaagaggaggtttggggtctgccaccatcctgctgctgtgtttttgctatcacacagtgggtggtggatctgtccaaggaaacttgaatcaaagcagttaactttaagactgagcacctgcttcatgctcagccctgactggtgctataggctggagaagctcacccaataaacattaagattgaggcctgccctcagggatcttgcattcccagtggtcaaaccgcactcacccatgtgccaaggtggggtatttaccacagcagctgaacagccaaatgcatggtgcagttgacagcaggtgggaaatggtatgagctgaggggggccgtgcccaggggcccacagggaaccctgcttgcactttgtaacatgtttacttttcagggcatcttagcttctattatagccacatccctttgaaacaagataactgagaatttaaaaataagaaaatacataagaccataacagccaacaggtggcaggaccaggactatagcccaggtcctctgatacccagagcattacgtgagccaggtaatgagggactggaaccagggagaccgagcgctttctggaaaagaggagtttcgaggtagagtttgaaggaggtgagggatgtgaattgcctgcagagagaagcctgttttgttggaaggtttggtgtgtggagatgcagaggtaaaagtgtgagcagtgagttacagcgagaggcagagaaagaagagacaggagggcaagggccatgctgaagggaccttgaagggtaaagaagtttgatattaaaggagttaagagtagcaagttctagagaagaggctggtgctgtggccagggtgagagctgctctggaaaatgtgacccagatcctcacaaccacctaatcaggctgaggtgtcttaagccttttgctcacaaaacctggcacaatggctaattcccagagtgtgaaacttcctaagtataaatggttgtctgtttttgtaacttaaaaaaaaaaaaaaaagtttggccgggtgcggtggctcacgcctgtaatcccagcactttgggaggccaaggtggggggatcacaaggtcactagatggcgagcatcctggccaacatggtgaaaccccgtctctactaaaaacacaaaagttagctgagcgtggtggcgggcgcctgtagtcccagccactcgggaggctgagacaggagaatcgcttaaacctgggaggcggagagtacagtgagccaagatcgcgccactgcactccggcctgatgacagagcgagattccgtcttaaaaaaaaaaaaaaaaaagtttgtttttaaaaaaatctaaataaaataactttgccccctgcaaaaaaaaaaaaaaaaa

SEQ ID NO: 4283 - DNA, 3203 bp, Homo sapiens
  source 1..3203: mol_type = genomic DNA
ggacaaactgttccagatgggagttggagaaagccttgctatggatgtgacatttgggctgagatgtggatgatgagaaggagtcaggcagccgtgccctggaggagatagcgatgcagacagcagaagccctgaggacagagccagctgacagcccatgtggtgccagaggggagaactggagaagttaaatcagtccacggatgatatcaacagacgggagactgaacttgaggtccagtaggtgtttgcagatcccttcttaagcctcaactgtgtttcctcggtttcccctggctgcaggatgctcgtcagaagttccgctctgttctggttgaagcaacggtgaaactggatgaactggtgaagaaaattggcaaagctgtggaagactccaagccctactgggaggcacggagggtggcgaggcaggctcagctggaagctcagaaagccacgcaggacttccagagggccacagaggtgctccgtgccgccaaggagaccatctccctggccgagcagcggctgctggaggatgacaagcggcagttcgactccgcctggcaggagatgctgaatcacgccactcagagggtcatggaggcggagcagaccaagaccaggagcgagctggtgcataaggagacggcagccaggtacaatgccgccatgggccgcatgcgacagctggagaagaaactcaagagagccatcaacaagtccaagccttattttgaactcaaggcaaagtactatgtgcagctcgagcaactgaaaaagactgtggatgacctgcaggccaaactgaccctggcaaaaggcgagtacaagatggccctgaagaacctggagatgatctcagatgagatccacgagcggcggcgctccagtgccatggggcctcggggatgcggtgttggtgctgagggcagcagcacatctgtggaggatctgccagggagcaaacctgagcctgatgccatttctgtggcctcggaggcctttgaagatgacagctgtagcaactttgtgtctgaagatgactcggaaacccagtccgtgtccagctttagttcaggaccaacaagcccgtctgagatgcctgaccagttccctgcggttgtgaggcctggcagcctggatctgcccagccctgtgtccctgtcagagtttgggatgatgttcccagtgttgggccctcgaagtgaatgcagcggggcctcctcccctgaatgtgaagtagaacgaggagacagggcagaaggggcagagaataaaacaagtgacaaagccaacaacaaccggggcctcagcagtagcagtggcagtggtggcagcagtaagagccaaagcagcacctcccctgagggccaggccttggagaaccggatgaagcagctctccctacagtgctcaaagggaagagatggaattattgctgacataaaaatggtgcagattggctgattcatcctgggccctggccgatgtgcatatcaacatttatacatggaactggagaacattgtgccaataatcatttaatatatgccaaatcttacacgtctactctaaactgctctaatgaagtttcagtgaccttgagggctaaagattgttcttctgggtaagagctcttgggctggtttttcagagcagagttcttgttgtgggtagactgtgactaggttcacagcctttgtggaacattccgtataacggcattgtggaagcaataactagttcctatgaaagaaccagagctgggaagatggctgggaagccaggccaaagtgggggcaacagcttgcttctctttctcttctcaccctcagtttgtatgggaaaatggagatgtcctctccactttatcccacgatatctaaatgaaaaagaaagaaaacccacacacaaagcaaaaactcaagtattaagagcacatatttttgacccagtggaggcttaaaaaaaaaaaaatccaagaacacaattcattttcaccacctctggtgttcagagggggcttttaaaaaagcgtgtatgctgggatacccattaaaaccattttctagaaggctaccatgagctgcactttttggggtgggaaaggtgaatgccagtggggatgcggggggatgagggtaggagggacttatagaaggggatttgtggctgtgggggagaaggttctacagcataagccttatcctgccagccaaggggatttattctaagagaagtgcatgtgaagaatggttgccactgttattagattgacaagatgttaatttctctgtaggttgtaactttaaaaataaatgaaattatttaagggttatgctgcactagtattccttagaggaaacagttctttaaagttaggaaagggagtaggcaggcatgtgttggcaaaggctgttaatagtagttaagtgttaagactgcttttctttaacgttttcatggtaatgcatatttagagcactgtatttttgtcttgttaagaaaatttagcatttctaaaagaaaaaagcaaccctctttcaaactgttaattctgtcacagcctgtatattttagtcatttgtaaatctcttcatacaatagtgacttcttttttgactgatacagtatcttaattacaaggttattttgtacttgtcttaatacactaagtgtaataaaaacggcttgagaaaagtttctcctttctgtgacttcaaataagaactcccagtattgcctaaatcttctaggcaaccctttttccataaggaagagcatggagtgctgtggtcaccagtaatcattttcaattaattaaggtcatgaacagtaataatttaagccttgtttaccaaggtttgaattctacttttgctgttgctaaagctgtgggcaatgaggagacacagtggcagataaagacgaggtggtgacgctggaggagtgggcctcggctgcacactgcagtctcgaagcttaagtgttgctgtcagtcagttctcatccccagagaattatttaattaattaactggggggggtacactggggcattagacttttaaaagctccccgagggaattcaaatgtgcattcagagttgagaatcagatggattctttcttttgtggaaatgttttataatattggactcttaatccgcatttcattattaaagcatgctgtggagaaaaa

SEQ ID NO: 4284 - DNA, 3322 bp, Homo sapiens
  source 1..3322: mol_type = genomic DNA
gcgctgactgccgcggcagaaagggggcggccgcgcccatttcctctgctccgccgcggccggaggtatccgcatcggcgagctgcgtctcccgggtgtcggccccggcggctccccgaccgtgcccggctgtggcgaggcggctccagcccagcctgtggcagccgcgacccccggggcgctccggagcccactgcgcggcgcgcgtgccggctgcctgcatggacgcggcactgaagcggagccgctcggaggagccagccgaaatcctgccgcctgcccgggacgaggaggaggaggaggaagaggggatggagcaggggctggaggaggaagaagaggtggatccccggatccagggagaactggagaagttaaatcagtccacggatgatatcaacagacgggagactgaacttgaggatgctcgtcagaagttccgctctgttctggttgaagcaacggtgaaactggatgaactggtgaagaaaattggcaaagctgtggaagactccaagccctactgggaggcacggagggtggcgaggcaggctcagctggaagctcagaaagccacgcaggacttccagagggccacagaggtgctccgtgccgccaaggagaccatctccctggccgagcagcggctgctggaggatgacaagcggcagttcgactccgcctggcaggagatgctgaatcacgccactcagagggtcatggaggcggagcagaccaagaccaggagcgagctggtgcataaggagacggcagccaggtacaatgccgccatgggccgcatgcgacagctggagaagaaactcaagagagccatcaacaagtccaagccttattttgaactcaaggcaaagtactatgtgcagctcgagcaactgaaaaagactgtggatgacctgcaggccaaactgaccctggcaaaaggcgagtacaagatggccctgaagaacctggagatgatctcagatgagatccacgagcggcggcgctccagtgccatggggcctcggggatgcggtgttggtgctgagggcagcagcacatctgtggaggatctgccagggagcaaacctgagcctgatgccatttctgtggcctcggaggcctttgaagatgacagctgtagcaactttgtgtctgaagatgactcggaaacccagtccgtgtccagctttagttcaggaccaacaagcccgtctgagatgcctgaccagttccctgcggttgtgaggcctggcagcctggatctgcccagccctgtgtccctgtcagagtttgggatgatgttcccagtgttgggccctcgaagtgaatgcagcggggcctcctcccctgaatgtgaagtagaacgaggagacagggcagaaggggcagagaataaaacaagtgacaaagccaacaacaaccggggcctcagcagtagcagtggcagtggtggcagcagtaagagccaaagcagcacctcccctgagggccaggccttggagaaccggatgaagcagctctccctacagtgctcaaagggaagagatggaattattgctgacataaaaatggtgcagattggctgattcatcctgggccctggccgatgtgcatatcaacatttatacatggaactggagaacattgtgccaataatcatttaatatatgccaaatcttacacgtctactctaaactgctctaatgaagtttcagtgaccttgagggctaaagattgttcttctgggtaagagctcttgggctggtttttcagagcagagttcttgttgtgggtagactgtgactaggttcacagcctttgtggaacattccgtataacggcattgtggaagcaataactagttcctatgaaagaaccagagctgggaagatggctgggaagccaggccaaagtgggggcaacagcttgcttctctttctcttctcaccctcagtttgtatgggaaaatggagatgtcctctccactttatcccacgatatctaaatgaaaaagaaagaaaacccacacacaaagcaaaaactcaagtattaagagcacatatttttgacccagtggaggcttaaaaaaaaaaaaatccaagaacacaattcattttcaccacctctggtgttcagagggggcttttaaaaaagcgtgtatgctgggatacccattaaaaccattttctagaaggctaccatgagctgcactttttggggtgggaaaggtgaatgccagtggggatgcggggggatgagggtaggagggacttatagaaggggatttgtggctgtgggggagaaggttctacagcataagccttatcctgccagccaaggggatttattctaagagaagtgcatgtgaagaatggttgccactgttattagattgacaagatgttaatttctctgtaggttgtaactttaaaaataaatgaaattatttaagggttatgctgcactagtattccttagaggaaacagttctttaaagttaggaaagggagtaggcaggcatgtgttggcaaaggctgttaatagtagttaagtgttaagactgcttttctttaacgttttcatggtaatgcatatttagagcactgtatttttgtcttgttaagaaaatttagcatttctaaaagaaaaaagcaaccctctttcaaactgttaattctgtcacagcctgtatattttagtcatttgtaaatctcttcatacaatagtgacttcttttttgactgatacagtatcttaattacaaggttattttgtacttgtcttaatacactaagtgtaataaaaacggcttgagaaaagtttctcctttctgtgacttcaaataagaactcccagtattgcctaaatcttctaggcaaccctttttccataaggaagagcatggagtgctgtggtcaccagtaatcattttcaattaattaaggtcatgaacagtaataatttaagccttgtttaccaaggtttgaattctacttttgctgttgctaaagctgtgggcaatgaggagacacagtggcagataaagacgaggtggtgacgctggaggagtgggcctcggctgcacactgcagtctcgaagcttaagtgttgctgtcagtcagttctcatccccagagaattatttaattaattaactggggggggtacactggggcattagacttttaaaagctccccgagggaattcaaatgtgcattcagagttgagaatcagatggattctttcttttgtggaaatgttttataatattggactcttaatccgcatttcattattaaagcatgctgtggagaaaaa

SEQ ID NO: 4285 - DNA, 5735 bp, Homo sapiens
  source 1..5735: mol_type = genomic DNA
gtggggggggcgccctcggagccgggcggaggggaggggggaaagaggagcgcagggtgagagtgagccgcaggcttcgggaggcgagggggcggggggagcagcgccgaggccgccgcctccgcctccgccgcctaggactagggggtgggggacggacaagccccgatgccgggggagacggaagagccgagacccccggagcagcaggaccaggaagggggagaggcggccaaggcggctccggaggagccccaacaacggccccctgaggcggtcgcggcggcgcctgcagggaccactagcagccgcgtgctgaggggaggtcgggaccgaggccgggccgctgcggccgccgccgccgcagctgtgtcccgccggaggaaggccgagtatccccgccggcggaggagcagccccagcgccaggcctcccgacgtccccgggcagcagccccaggccgcgaagtccccgtctccagttcagggcaagaagagtccgcgactcctatgcatagaaaaagtaacaactgataaagatcccaaggaagaaaaagaggaagaagacgattctgccctccctcaggaagtttccattgctgcatctagacctagccggggctggcgtagtagtaggacatctgtttctcgccatcgtgatacagagaacacccgaagctctcggtccaagaccggttcattgcagctcatttgcaagtcagaaccaaatacagaccaacttgattatgatgttggagaagagcatcagtctccaggtggcattagtagtgaagaggaagaggaggaggaagaagagatgttaatcagtgaagaggagataccattcaaagatgatccaagagatgagacctacaaaccccacttagaaagggaaaccccaaagccacggagaaaatcagggaaggtaaaagaagagaaggagaagaaggaaattaaagtggaagtagaggtggaggtgaaagaagaggagaatgaaattagagaggatgaggaacctccaaggaagagaggaagaagacgaaaagatgacaaaagtccacgtttacccaaaaggagaaaaaagcctccaatccagtatgtccgttgtgagatggaaggatgtggaactgtccttgcccatcctcgctatttgcagcaccacattaaataccagcatttgctgaagaagaaatatgtatgtccccatccctcctgtggacgactcttcaggcttcagaagcaacttctgcgacatgccaaacatcatacagatcaaagggattatatctgtgaatattgtgctcgggccttcaagagttcccacaatctggcagtgcaccggatgattcacactggcgagaagccattacaatgtgagatctgtggatttacttgtcgacaaaaggcatctcttaattggcacatgaagaaacatgatgcagactccttctaccagttttcttgcaatatctgtggcaaaaaatttgagaagaaggacagcgtagtggcacacaaggcaaaaagccaccctgaggtgctgattgcagaagctctggctgccaatgcaggcgccctcatcaccagcacagatatcttgggcactaacccagagtccctgacgcagccttcagatggtcagggtcttcctcttcttcctgagcccttgggaaactcaacctctggagagtgcctactgttagaagctgaagggatgtcaaagtcatactgcagtgggacggaacgggtgagcctgatggctgatgggaagatctttgtgggaagcggcagcagtggaggcactgaagggctggttatgaactcagatatactcggtgctaccacagaggttctgattgaagattcagactctgccggaccttagtggacaggaagacttggggcatgggacagctcagactttgtatttaaaagttaaaaaggacaaaaaaaaaatctaaagcatttaaaatctagtgaaataactgaagggcctgctctttccattgtggatcacagcacacacatacatacaccctccacctccccatcccctgttctccctctgttgctccccttataaaattgatgttgtctttaccagaaaggtagacaaaaaagaagcagcagcagctcttaaagtgagggttattctcatactcggttccagccatcagcagacttcctgctcatcggcagatccccctttccaacctgtaactctgatgtgctctggatcagcttttaacttttaatcatatattactgtcttctaaatcccttctcctcctctactgctgccctatggttctggctcctaccccctgcggcacacttatcttcaaataccatagaattctaatctctggaggctggcagcttgacttggcactttagggccccttagcagggtgagctgttaaaacagcacacatctctcatcccctcttcctttattcccccctgggtttcagaaaggaaggatatatggggaccacctcccccttctttgatcccagcatctcagtccccctcccaaccctccatatggctctcaatggtgctcacttgcttggaagcaggctcccaatagggagggggctgccctctacagtctctttgactgtaagacagggctctgtatcagtgagacgatgagaaaagtcccaggctaatggcagaaatttgcactttgaacatgtgtgtttttgtgttgtggaacctgagattccttatttattaacaggaagtctgattttttttttttggagtctttgttgctatattttgtggggctgggagagagagattagattattttgacatgggatcccttccataacaggtactttgaaggcaagacatagggttgaagaagcacagccagcctctgaaatcatagctctccagtggcttttaaagaaagctggtcctcagcactaacaaaatcactacaatagcctagtgcttttttggaagcctttttagggaagaatgttaggttcatggtaactagtatgctctttgagatttttacagtgttgaaacttaagaattttgagagggtgaggagggttgttcagaatctaaattacagatagatgattgtttcttgtgaatttgtttcttttcctttttttttgtccctaccatttccttacatttcccttggggcccatctctggctccttgctttttgtttcttgctttgctttatcagttcattccagctccctgttagtgaaggacactgctgttagtgaaggaacaaagtctatgagtcctaaaattttaagtcaaagaaaactgctctgtttcccctttagtaacacttctgaagaggaaaaacttcaatagccaaagttaataatcctatataataattgctttggctttcacctaaaattctgggcatcacaatttccttgggatagaggttgtgttggggaatagattgcttattgctgttcactggagagaaaaggtagtgtttttgtacaaggtcataccgccagaagccccaaatcctattttggctcatcttcaggtaaagagtaattcctatcctgtgtgcctcagaagctagaatcgaaggcttaccctattcattgtttattgtcagaaatgcatgatggctcttggaaagaatgacgttttgctggaaaaaaaaaaaagaacagtttgtgtttcacaaacatggcttatcaattttttcaaagaattcttttttcccaaaaagaggagtaacaaaatgtcatttctgaaagaggcttactttataccaactagtgtcagcatttgggatgccagggaacagagagtgagacacctacaatcaccagtctcaaatgcgctattgtttcttttcagagtgttgcagatttgccatttctccataatatggggatagaaaatggaataaagatagaagggatgtagaatatgctttcctgccaacatggtttggagtcgactttggtatattgactagatttgaaaatacaagattgattagatgaatctacaaaaaagttgtcctcctctcaggtcccttttacactttttgactaactagcatctatattccacacttagcttttttgtcacacttatcctttgtctccgtaaatttcatttgcagtggttagtcatcagatattttagccacctacacaaaagcaaactgcatttttaaaaatctttctgagatgggagaaaatgtattctcctttcctataccgctctcccaacaaaaaaacaactagttagttctactaattagaaacttgctgtactttttcttttcttttaggggtcaaggaccctctttatagctaccatttgcctacaataaattattgcagcagtttgcaatactaaaatattttttatagactttatatttttccttttgataaagggatgctgcatagtagagttggtgtaattaaactatctcagccgtttccctgctttcccttctgctccatatgcctcattgtccttccagggagctcttttaatcttaaagttctacatttcatgctcttagtcaaattctgttacctttttaataactcttcccactgcatatttccatcttgaattggtggttctaaattctgaaactgtagttgagatacagctatttaatatttctgggagatgtgcatccctcttctttgtggttgcccaaggttgttttgcgtaactgagactccttgatatgcttcagagaatttaggcaaacactggccatggccgtgggagtactgggagtaaaataaaaatatcgaggtatagactagcatccacatagagcacttgaacctcctttgtacctgtttggggaaaaagtataatgagtgtactaccaatctaactaagattattatagtctggttgtttgaaataccatttttttctccttttgtgtttttcccactttccaatgtactcaagaaaattgaacaaatgtaatggatcaatttaaaatattttatttcttaaaagccttttttgcctgttgtaatgtgcaggacccttctcctttcatgggagagacaggtagttacctgaatataggttgaaaaggttatgtaaaaagaaattataataaaagggatactttgcttttcaaatctttgttttctcttattctaggtaaggcatattaaaaataaatatgtaaagaagaaaaataaaagttgtcttcatggaagcaacttgtcttccttggttgtactgagttacagttatcctaggggtgaaacatgtgatgctgctaagcaaaccaaatgccctcagaacaggtgttatgtggggcatactattgtttgcttttgttgagaatcaggtggttaatttttgactgttcttgatttctaatgctgaaatgacatgattctgttattcagcaaacttggaaatcttgatgttttgacaactgcctcctaggaaaactggccatatgttaattaacctagtagatggaaaattaaggattatgtgaggttaattttaccctgataatgacaaaaccttgatagcatttaatattaatacttcttctcaaaattgaatgtttatatcaagtactgatttttattttaaaaaagaaaaaactataatccttctgccttccaaaagccatgctgtgatagctgcccaggctgctctgttacatctcccatttattgtttacttttataaatttgcttctaagatggaaaaaaaaaa

SEQ ID NO: 4286 - DNA, 1914 bp, Homo sapiens
  source 1..1914: mol_type = genomic DNA
agagtcacatctcttatttggaccagtatagacagaagtaaacccagctgacttgtttcctgggacagttgagttaagggatggctttcacagagcattcaccgctgacccctcaccgtcgggacctctgtagccgctctatctggctagcaaggaagattcgttcagacctgactgctcttacggaatcctatgtgaagcatcagggcctgaacaagaacatcaacctggactctgcggatgggatgccagtggcaagcactgatcagtggagtgagctgaccgaggcagagcgactccaagagaaccttcaagcttatcgtaccttccatgttttgttggccaggctcttagaagaccagcaggtgcattttaccccaaccgaaggtgacttccatcaagctatacatacccttcttctccaagtcgctgcctttgcataccagatagaggagttaatgatactcctggaatacaagatcccccgcaatgaggctgatgggatgcctattaatgttggagatggtggtctctttgagaagaagctgtggggcctaaaggtgctgcaggagctttcacagtggacagtaaggtccatccatgaccttcgtttcatttcttctcatcagactgggatcccagcacgtgggagccattatattgctaacaacaagaaaatgtagcagttagtcccttctctcttccttgctttctcttctaatggaatatgcgtagttccctggggcctcgctttcccatcttaaatttctaaaaacagttaagacaacaggcattttctttcttttttctctgaccacctgcagcctgttgaaggactacaggtattttcatcaagtagcgttggagacatacacaaatgggcatacaagtttagcctggggggtgtgatttgtgtgcgtgcttgcatgtgctgcaggtgtaagagagtgggagcagggacaacgtccttccacttcagggttctaacctttctaacccactaagtaacctctacaggcatttaactgccttacagacagaatatacatatgttaattctagtcctggatgactcggtctgagaagattcaatttaaaatcagactctttagttgatttaaactcttagagaataagaataataatggctaacttttattatcttctatattaaggcagtatgccaagggtctttatgtatattatgtacagcgtttacaaccttgtgagcaaggtggtgttactcccattaggtagatgagaaaacaggctcacagagatttggttaagctcacacagctaacaagtagcacactgagtttgaacacagatcattctccttgtaaaagcctatgtgcctttcactttagaggcttgatcatgaatcactgcacctctttgtcacagggtgttggaagatgcatccatgtaatctattcccatcgctggaaaacagctgctgttagatgtcctcagaagtcagttgcaaattttagcgttaaagtcaggatttattgttcatacttggcggtgaggagggcagctggagatcttaagattccattttggaaaatgattaggcccgccaaacttctgaactttggaagctggggatgtttagtaatacagcctggtttttaagtactcactaaaagttctcaaatattgggttgggcacggcttataccaggttacctcacttttaattagtgatgcaggcagtgtaacccaagcatttgtggacaatgagtggaatactaaagttaaaaagtcaaactttcacctcagattttctggacttagtcatgaggagagggtgaggcccactctgttcctactggagataccagagactctgaaactatagaataaagcctctgtgctgcacaacaaaaaaaaaaaaaaaaaaaaaaa

SEQ ID NO: 4287 - DNA, 1418 bp, Homo sapiens
  source 1..1418: mol_type = genomic DNA
aaacaataacgtcattatttaataagtcatcggtgattggtccgcccctgaggttaatcttaaaagcccaggttacccgcggaaatttatgctgtccggtcaccgtgacaatgcagctgaggaacccagaactacatctgggctgcgcgcttgcgcttcgcttcctggccctcgtttcctgggacatccctggggctagagcactggacaatggattggcaaggacgcctaccatgggctggctgcactgggagcgcttcatgtgcaaccttgactgccaggaagagccagattcctgcatcagtgagaagctcttcatggagatggcagagctcatggtctcagaaggctggaaggatgcaggttatgagtacctctgcattgatgactgttggatggctccccaaagagattcagaaggcagacttcaggcagaccctcagcgctttcctcatgggattcgccagctagctaattatgttcacagcaaaggactgaagctagggatttatgcagatgttggaaataaaacctgcgcaggcttccctgggagttttggatactacgacattgatgcccagacctttgctgactggggagtagatctgctaaaatttgatggttgttactgtgacagtttggaaaatttggcagatggttataagcacatgtccttggccctgaataggactggcagaagcattgtgtactcctgtgagtggcctctttatatgtggccctttcaaaagcccaattatacagaaatccgacagtactgcaatcactggcgaaattttgctgacattgatgattcctggaaaagtataaagagtatcttggactggacatcttttaaccaggagagaattgttgatgttgctggaccagggggttggaatgacccagatatgttagtgattggcaactttggcctcagctggaatcagcaagtaactcagatggccctctgggctatcatggctgctcctttattcatgtctaatgacctccgacacatcagccctcaagccaaagctctccttcaggataaggacgtaattgccatcaatcaggaccccttgggcaagcaagggtaccagcttagacagggagacaactttgaagtgtgggaacgacctctctcaggcttagcctgggctgtagctatgataaaccggcaggagattggtggacctcgctcttataccatcgcagttgcttccctgggtaaaggagtggcctgtaatcctgcctgcttcatcacacagctcctccctgtgaaaaggaagctagggttctatgaatggacttcaaggttaagaagtcacataaatcccacaggcactgttttgcttcagctagaaaatacaatgcagatgtcattaaaagacttactttaaaatgtttattttattgcc

SEQ ID NO: 4288 - DNA, 11956 bp, Homo sapiens
  source 1..11956: mol_type = genomic DNA
ctgctcagtgtcaaattaacaggaaagtcagcttaaaggacactccttgcagggactgagctggcacctactccttagagcttgctgataccaggcctgccacgcgacatctgcaaggacagttgtttggtgttttgcttcaggttatagatggagagacctataaaggactccatgttttcgttggccctgaaatgccttatcagtctgtccaccatcatccttttgggcttgatcatcgcctaccacacacgtgaagtccagctcttcgtgatcgacaatggcgcggatgactggcggatagccatgacctacgagcgcatcctgtacatcagcctggagatgctggtgtgcgccatccaccccattcctggcgagtacaagttcttctggacggcacgcctggccttctcctacacaccctcccgggcggaggccgatgtggacatcatcctgtctatccccatgttcctgcgcctgtacctgatcgcccgagtcatgctgctgcacagcaagctcttcaccgatgcctcgtcccgcagcatcggggccctcaacaagatcaacttcaacacccgctttgtcatgaagacgctcatgaccatctgccctggcactgtgctgctcgtgttcagcatctctctgtggatcattgctgcctggaccgtccgtgtctgtgaaaggtaccatgaccagcaggacgtaactagtaactttctgggtgccatgtggctcatctccatcacattcctttccattggttatggggacatggtgccccacacatactgtgggaaaggtgtctgtctcctcactggcatcatgggtgcaggctgcactgcccttgtggtggccgtggtggcccgaaagctggaactcaccaaagcggagaagcacgttcataacttcatgatggacactcagctcaccaagcggatcaagaatgctgcagccaatgtccttcgggaaacatggttaatctataaacacacaaagctgctaaagaagattgaccatgccaaagtgaggaaacaccagaggaagttcctccaagctatccaccagttgaggagcgtcaagatggaacagaggaagctgagtgaccaagccaacactctggtggacctttccaagatgcagaatgtcatgtatgacttaatcacagaactcaatgaccggagcgaagacctggagaagcagattggcagcctggagtcgaagctggagcatctcaccgccagcttcaactccctgccgctgctcatcgccgacaccctgcgccagcagcagcagcagctcctgtctgccatcatcgaggcccggggtgtcagcgtggcagtgggcaccacccacaccccaatctccgatagccccattggggtcagctccacctccttcccgaccccgtacacaagttcaagcagttgctaaataaatctccccactccagaagcattacccataggtcttaagatgcaaatcaactctctcctggtcgctttgccatcaagaaacattcagaccagggaacggaaagaagagagaccgagctaattaactaactcatgttcattcagcgtgcttggtccgacatgccttgaaaccagaaatctaatctctgtttaggtgcctctacttgggagcgggaagaggagatgacaggaagcgacgcctctggcagggcccttgctgcagagttggtggagaacagaaatccacgctcaatctcaggtcttcacgcggggggtgggggtcagatgcactgaagtagccaacagcgaagccagtccagaagaggggtccgctgggagggagggttgtgtcaggcttgggggatgggctcttcgccatgggggtctttgaacacacctctctcctttccttttgtctacggaagcctctgggtgacaaaagtaaaagagagctgcccacaacttgccaaaacagatatactcgaatcagactgaaaaaaaaaaaaaaagacacagacaaataaaaagccagattttccactcgatattaatacccacataaacctgtgtgtttgcaaacgtgtacatgtacacacatacacatcccacgttcgcttcaggtcctttcttatttgagcttaatccaaataaaaagggacttgacaccttaccctgcatacaataggcaccccttacatgtgttttgagttggtctgaatctgaacatggggtgctttcagttcaggtagttagctagttctggccacattctgagtttcactgaagatgtggatcccttcagacataatgcacattgctttgtcctggatatgcaccttgcttgatttgaaatggatgccaagccaaaattgttggcattcaggagggataagcaggcttctaaaaataacagcatctgcagagttttcttcttccatccaaacaagttgtgtttcgatggtccacatgaccaggtgtatgtctgtaagtgtggagggagaggacaagaaattgtgcatgtgtgtgcagacatgcacaaacaggagcaatccaataacaccttagtgaatagaaatatggttggggatttgctgagctgtatttatccagcaacaggtttccagccccagatgttagtagtgcaaaagggccaagtgcctcaattgtgagcctctgagctaggaggagaagtgatgaagagtggcctatgtggtcccttctacctgaccttaagtcatctcaaaatgaaatattgtgagaatgaagggaacccttagggaaccttgtgggtaaggtaagtggacatggatttgtcagtagcctgttcctactgtgccatgttaatcttggtgcgaaaaactattccaatacatctcaaactccaagagacttcagaaacatcaagatttagtgtaatgagcggcgcagaaaaatgttttcattgctccataatctgaccacacgtaacatttgtgacgtgaaaaccatgactttctcattctgaggtctttggtttctgcctgtgggaaattgaatggcactgtatggactatttcatctgttgatggtaaaacaaaagggtgatttttttgcttgtggttgtcatcttgggtttacctttgtaagaagacatcatcaccattctgaaggcagtggcttggcatggagatttttattctgtagcactgggcctgttcttctaaggacagcacaaggtagacaattgtagagccaaggccactttttcaggaagatctagtctcttgctaaccctcttctttctctcttgctattgctgctgctcttttgatggtttatagtcttaatggcctgccttgataattcctttgaacactttcattagttgttttgcataccagagatgccgcacctgctgttggcttatttttttacttgttctattaactgttgattatctgaatgtttcccctcctccttgtttcatgtcccaagaatggtgctcctgttttcagtgacagttcagctgaacatataagcagatgtgtaaacagatgaagtaaccatgcagtttccttgtggcattagttccatttcacaaagtgaagaccactggtgggctgatctgagtgtgccaatcctgatcatttaaacctacagccttcaactggtgattcctacccaccgttttcattctgctataaccctgtgatatgtgtgcgtgtgggtgtgagtgtgggtgtgtgcacatatagagatttagtcttaatttcaaccaaatgacatgcaagattccactgccactcttcctggccaaaagtgtgcacagactgtgatttattcattgtggtctgtgactttaacccatcattgatgctctcacttaggtaaaccctaaagaccaaactagcaacactagtcaagggagtgactggagttatttctggtagcagtagccactggcatcctagaaacacatggacatttgtagcatgaattgacctattggtagtgcaatagctatacatgatttttattcttggcaaaagaaaatgcttcaaaaaaaaagtgatcaaacctgcacattgatcctgtaatagcaaatggaaggctatttctctgtactagcatttcagctttatgtgggaaagttacccgttctcctgcaagtacaatcaacccttgatgacttaagtattaattattctgggtgtagctcacccaagttttcttcctacatcttttggctaattccaccacacctcagcatcacagtcagatgggaaaaggggcaggtggattctcatgtcatgccttcttgtaccttattttcaagttttgtggtggaggaggtttaattatctgctcaagaatctggtatatatagccaggtgcggtggctcatgcctgtaatcccaggactttgggcaaggcgagaggatcacctgaggtcaggagttcaagaccagcctggccaacatggcaaaaccccatctctactaaaaatacaaaaattagctgggtttggtggtggacacctgtagtcccagctacttgggaggctgcggcaggagaatcacttgaaccccggaagtggaggttgcagtgagccaagatcgtgccattgcactccagcttgggtgaccgagcaagactccgtctcaaaaaaaaaaaaaaaatcggctatatgtaaaaactattaattatgtaacctcactccaatactgtactgatcaagatctgcccactcctagaggactgacccaatggcagatcccctactataatctttctgacaactcagtgacaggtaaaatcactctaatattcctaaaatatctagacacttgaattagaaatacagaaccacccccacccctgccattgcttaagccatattaaagcttcatgtactgtaaagtcagggatgtactgtgatactttaagaccactaatctcagtggaatttcaggacatagcattagttggtaaattacaccagactaggggctcactcctccttagattgaagtccaaataaaagtcttcacctttggatcaaaggccacatatatatgatcatcatcaataaattgtcataaagtgtctatgaactgctcttgccatcttcctaatacgtaacttcatgacatcatgtctctagaagtgcttaatacaatccaaaagaacaaggggggaaggccccaagtcaccactgaccgacctcagcaggggccagtggtagaacaacaatcttgtgaattaggagacatagaaaatgtacgcaaaagtaaattccaagcgctgagcatgtacaagctatttttattattaaaagccaagaaggaagagcattgaagaagtaatgattttaatatagtgggggatttcccccttaaatttttataatttccttgtgaataaacaatcatggaaaagaagaaacctagtcatacaaaatcagaataaataaaaatcttaagactggatccacatctttggccaattcatataagcacctaatacatcaatttctctgtacttaaaatgaagagaataattaatattcttaagtacaatgttttcaatagagaacaaatgaaatcacctttgtcatcaacagcagcccagactgactgtatctagatcacaccttgatgttacgtttgaatgcagtcagtagttaccaaaaagtaattagtgcacattaaatagtggtaaaatcagcagggagaaatatgggattagcacgtagttccagaaccttcctcctcctccagagtgcaactcaacaaacagtacactccaaattaagaatcaatgtttcatcccaggacaaacggtgttgctcccatcacagtaccacaactgagatactgtgaagtcattgcactaccagtaggttactactcttttgaagttactgtttttaaatcctaaaatatgtccccagttttctacattcattcttcttcccctaagagttgctagaagcagatgaaggatccctattgactctgcagggtttgatttcagtaccttagacagctatctggtgacttcccagtaggcacgaacaaccccttctctccccttgcagtcggtgggcttgatgacgccccagacagtatcctttccttctctactgccgccaaaataaacattagggaaatgggatcattaacaccactgagaaaggagtttacagggatcgcaatagtaactgtctgcttgtggtagtagaaagcttgtgccaggctgcatgaatagaaattaatgttaaactcctgttagacgagtaatatgtagatttttattgaaacagaccacagcttattaaaaagtactcagtgcaatggtatatacatatatacagatagaaaaaaatataactgtgatctttttgtcttacgccattactggaaacacccaaacgtgaactggagttccctctgaacaaaaccattgtcaaatcttcaacatatgacctccaaatctaggtgccaagtgccctgtgacagttgtttacacacctgaaaaatgtatcctggaagctgtaatcttgggcctgggctatgtgttgaaacaagcaaaagagacacatcgtgaccaaccaagctggtggaggaaaagcacaaaattcaactccaacctgcagttaggatcccaaagagatgttgacatttatagccaaaaagaaaaagtacatatatatatatatatatatatatatatatatatatatatatatatatctgaatcagatcgaagcagccaacgtccagcttcactcaagaaggacaaggaataaacaacattctctagctgtgtcatgttgtctcagtttttgaatctcaaccaggactgatccaccttcatcagatacgttttttaatggcgcaacaactcaattttggtcccagactctccattctgcactggccacgagaacaacaagagaatgacaggatgttaatggaggaaacattttcatggcaagctcagaaactgaagtgtttatattcagaatcagatgagctttaatatgaatttgcatcttgcctctgtactgcttgctattttttaatgataggagaaagcataacagtttattttaaatatgaaatatattgatatattataaaatatattgtaactttcaattaacattttgtatcaaactagtgtttagcaggtccactgtcagcctgctctcccaatgactgtttctgagtacacatcactgttagtgattgccgggcacccagaaaaagggtcctcctaccacagcctactgaactgccatattctaattctccaaggcctgggtattagagacaaaagaacattattccaagagtagaggaataattctaccctaaattctatcaagccatttcagaagagattttaaaagccatcactcctttagtagctctgcaaagccagtttaataaaagttcaggctctttctatataaattcaaaggcctcattacataaattatataagtctcaaacctagccaaccagttttcctttgacaatgtcagaattggacataagaaagagtcctgttttcctgtaacttaaaatactcaaaatcctaggcattctgagtttctccatgtacgtgaaaccggggtcggctttccaaactacacaaggcccaacaagagtccagtgtgcagatgtgcttttctaaattggcaatacccttgagggagcaaggttcccacatgtttatcaaggacatggagcccagctcctaagggagtgatgggaggagccggcaggacatgaacagccagagccagcaaagagccgggctgccttttctgctagcttcctctagctgggaggaaataaagggttcccgttgagatattgtcctttatagcaaaattaagcaactcatggaatctacacccctctttctctacagagcagctgagacatacatgtagaagttctcagttccctccttcatatggctaaggcactacttctagatgaaaacaggatgtgttcggttacagaataaagattttctagaatcagtgagcctcttctcacctgggaccctcacttgctgttgttgctttggtgcaatattgtacaggtgcaaaccaggttgcatcggggcagattaactgagcctatgtgtctcttcccttcccaagccctgaaaattcacatagatttacagatagtgcaaaacaacaagttttctcctgggaaaaggctggaatccttcaaatttcaatttatatgagcttaaaggtatataagtcatggggctcactgacattaggtattcatgctgtttgaaagagaaatgtctaaatgcccgttttcagtctgtttgtgtagctgagccctaacttgtacacaagttttcttgttatggagctaaattctctcagtgcctgtattactcctcagttatatgttaggccgagctccactaaagccatctgaactccagggcacttgtttttatcaggttacttactcaccggataatggaaattggcttattttcaattttacaattgactgatgaatgtattggtggtaattgatttatttcttcacttttttttgctactaaatgattttttcttttttaaaattattattattattattttgagatggagtctcactctgtcgcccaggctggagtgcagtggcgccatctcagctcactgcaagctctgcctcctgggttcatgcaattctcctgcctcagcctcccgagtagctgggattacaggtgcgtgccaccacgaccagctaatttttttgtatttttagtagagacagggtttcatcatgttaaccaggatggtctcgatctcctgacctcgtgatccacctgcctgggcctcccaaagtgagccactgtgcctggcccagtaagtgcttttttcttttggtttttccttctaacactgctcagaccaagacttacatttataaagagcaaatatattctgacctttcccctcaaagttgtattccatctagaatcaaggaaacaaatgcaaattcatcatttggggaaagcagacctcttgacagtaattcaagtccatggctatatgctaacccttgctactcaaagtgtggtccacagaccagcagcgttagcatcatctgtaagcttgttagaaatgcagaatctcaggccccacatcaaaccttcttcatcagaattggccttttaacaaatccccaggtgacctgtatgcaccagaaatattgataagcactggcctcacctcaccgtagtgataactaacctcgttaataattagagaatgaagctatctcttccttgagtctcatttacagaattatttgaagatgtgaaggtcctgaatgatcataaggattaaaaaaatgcatctttaaattccacttgaggttatataacttggatggtctacatcaaacataataaagtcaataagagatagtctttttccggtcttacctaaatagcactccatatccttgagccacctcaaagcccccatttttaagttttagtctttttttttttagaccagactagcaaagccatcagaatatcaggtggaacctcagggcaggtcctctggaaggctacaggagtctctgcttagcatagtacagaaattgttgtgtttctcgatccttgtgttcttcccttgaggaactcagcatctcaccagtaagaactcccctcccctagaggaaaatagcaagagaagttagtttaaccatctagaaacattgctaatctccttgaaagccaattctcttactcattgcaccaacaagaaacactccaaggtgggcaaggaaagacgtgaattctgatattggcgccataactcgatatgtacccagaaacagttatgttctaaattaatggctttaacctgttcattgtaaaaagtgccttggacttcaatctaaagaggtcagtataaatatgtatgtgtgtgtgtgacgtgtatgtaggcaaatatttacagatttatacatacataggtgcacacacatatacccgcacattcatatataatatatacatacatatataaatgcttcataatatatcatattgctattcacagctccatttcttttgtctggtcctatgtttatttgtttagtgagacctttacatagagaggttctattcggaacattgatgtattttttgtttgttttttactttttattaaaaaggtaaaggatattaaaaaaaaaaaaaaaagtcaagtgcctgaaggttttgaatggagttacggtaaactttctcaggtcaccaaagaggaaacatttttcctttggaaaacatttttctgtttcagtgactttgttttcccttggtggtaatgcataaataagagtggttaaagtgattttgtaagttttatttcaatccatttctgtggttcccataaggcaatagctaaaaatttgttcagtctagtgcccagttttctccacacatcagcatcagaagggcccggtcttcacatgctctgtgtggttttgttcgcgttgttactgtgttccttactaaggaaaggcaaatgaaattgcaggggctggagcttagaccagctccaaatatggcttccttttggtaacacacacagaaggtggactagtgggaagtctctctccctgaagcaggtgggaacctgtgtcttagaaggcagaggagtcccagtgaactctccacagctccatgggccctgcctgtctacagttatacaactgcctgtatgagtcagcctttctctaccttagccaaaggtcttctctttctgtggtgtgacagcttgtaatgaaccaacttgctctggttagaagtccctagagctccaggaagagtcgccaggtttccattgctgtgctcaaagctcaaggacacattatacttctttaaaccaactaaatctctctagctccctgcccccatggtgacactttcataataggcagggccaagtcagagaggtcatgccctgtatacagtgtcaatcagaagagacactgcaaaatgtcagaggtgaccagaaagacaacagatctctccagctgtcctcacagctgcaggcacatttgtggaattgtgagtaggaaggcttggcagccaggggatgggaaatgaatttccccaagttgaaaaccctgtacccttactttccttcccataaatttttctgtagttctaggtaaataataataataataaaaatgcaaattaggtgctttagaaggagtatgtaatatctgggactttttctaagttggtagacctaaaaaatgttttcaaaaatatatctagctgcatttctactgctgtcattccttaaagctcttcctccaaaaactccatatgaatgaatacatttaccaactcagtgattactaaataatagtactttatacttatacacagtaatacctttcatctaaggatctcaaatgccaatatattagtcatcaccctgtaaggtggatgacatattattcccattattccaatgggaaaattgggccatagaaaactgaggagcaaatgactcatctacaggaattaaatggaaaaaacaggctaggatttctcagcacactttaggagtgaatgaaaacttacaggcttcagttctactgctggccaccattggatttgtaagatccaggatgtgtattgaccacatgtgtccagacccaggcttagggcatctggaatgagagtggtgggctggtgtgtgggtctgaggatctggatgggagactgcattttcttctctgtgcaaaatatggaagtgtgaccttgaaggtgggcttagtctatggccttccccactcctgcttgaactgaagctggagagaatgggcatttttaaatgttacggcatatgctaatataatattatggcattaaataaaaacaagaagagaactgactaaaaccaaaaaaaaaaaaaaaaa

SEQ ID NO: 4289 - DNA, 13035 bp, Homo sapiens
  source 1..13035: mol_type = genomic DNA
gagccagcgaggagtgaagctgagcctggcctcacacgctcctagaggaccacctcctgagagagttctttcaccccctcttctttctccaagctcccctcctgctctccctccctgcccaatacaatgcattcttgagtggcagcgtctggactccaggcagccccagagaaccgaagcaagccaaagagaggactggagccaagatactggtgggggagattggatgcctggctttctttgaggacatctttggagcgagggtggctttggggtgggggcttgtgctgcagggaatacagccaggccccaagatggacacttctgggcacttccatgactcgggggtgggggacttggatgaagaccccaagtgcccctgtccatcctctggggatgagcagcagcagcagcagcagcagcaacagcagcagcagccaccaccgccagcgccaccagcagccccccagcagcccctgggaccctcgctgcagcctcagcctccgcagcttcagcagcagcagcagcagcagcagcagcagcagcagcagcagccaccgcatcccctgtctcagctcgcccaactccagagccagcccgtccaccctggcctgctgcactcctctcccaccgctttcagggcccccccttcgtccaactccaccgccatcctccacccttcctccaggcaaggcagccagctcaatctcaatgaccacttgcttggccactctccaagttccacagctacaagtgggcctggcggaggcagccggcaccgacaggccagccccctggtgcaccggcgggacagcaaccccttcacggagatcgccatgagctcctgcaagtatagcggtggggtcatgaagcccctcagccgcctcagcgcctcccggaggaacctcatcgaggccgagactgagggccaacccctccagcttttcagccctagcaaccccccggagatcgtcatctcctcccgggaggacaaccatgcccaccagaccctgctccatcaccctaatgccacccacaaccaccagcatgccggcaccaccgccagcagcaccaccttccccaaagccaacaagcggaaaaaccaaaacattggctataagctgggacacaggagggccctgtttgaaaagagaaagcgactgagtgactatgctctgatttttgggatgtttggaattgttgttatggtgatagagaccgagctctcttggggtttgtactcaaaggactccatgttttcgttggccctgaaatgccttatcagtctgtccaccatcatccttttgggcttgatcatcgcctaccacacacgtgaagtccagctcttcgtgatcgacaatggcgcggatgactggcggatagccatgacctacgagcgcatcctgtacatcagcctggagatgctggtgtgcgccatccaccccattcctggcgagtacaagttcttctggacggcacgcctggccttctcctacacaccctcccgggcggaggccgatgtggacatcatcctgtctatccccatgttcctgcgcctgtacctgatcgcccgagtcatgctgctgcacagcaagctcttcaccgatgcctcgtcccgcagcatcggggccctcaacaagatcaacttcaacacccgctttgtcatgaagacgctcatgaccatctgccctggcactgtgctgctcgtgttcagcatctctctgtggatcattgctgcctggaccgtccgtgtctgtgaaaggtaccatgaccagcaggacgtaactagtaactttctgggtgccatgtggctcatctccatcacattcctttccattggttatggggacatggtgccccacacatactgtgggaaaggtgtctgtctcctcactggcatcatgggtgcaggctgcactgcccttgtggtggccgtggtggcccgaaagctggaactcaccaaagcggagaagcacgttcataacttcatgatggacactcagctcaccaagcggatcaagaatgctgcagccaatgtccttcgggaaacatggttaatctataaacacacaaagctgctaaagaagattgaccatgccaaagtgaggaaacaccagaggaagttcctccaagctatccaccagttgaggagcgtcaagatggaacagaggaagctgagtgaccaagccaacactctggtggacctttccaagatgcagaatgtcatgtatgacttaatcacagaactcaatgaccggagcgaagacctggagaagcagattggcagcctggagtcgaagctggagcatctcaccgccagcttcaactccctgccgctgctcatcgccgacaccctgcgccagcagcagcagcagctcctgtctgccatcatcgaggcccggggtgtcagcgtggcagtgggcaccacccacaccccaatctccgatagccccattggggtcagctccacctccttcccgaccccgtacacaagttcaagcagttgctaaataaatctccccactccagaagcattacccataggtcttaagatgcaaatcaactctctcctggtcgctttgccatcaagaaacattcagaccagggaacggaaagaagagagaccgagctaattaactaactcatgttcattcagcgtgcttggtccgacatgccttgaaaccagaaatctaatctctgtttaggtgcctctacttgggagcgggaagaggagatgacaggaagcgacgcctctggcagggcccttgctgcagagttggtggagaacagaaatccacgctcaatctcaggtcttcacgcggggggtgggggtcagatgcactgaagtagccaacagcgaagccagtccagaagaggggtccgctgggagggagggttgtgtcaggcttgggggatgggctcttcgccatgggggtctttgaacacacctctctcctttccttttgtctacggaagcctctgggtgacaaaagtaaaagagagctgcccacaacttgccaaaacagatatactcgaatcagactgaaaaaaaaaaaaaaagacacagacaaataaaaagccagattttccactcgatattaatacccacataaacctgtgtgtttgcaaacgtgtacatgtacacacatacacatcccacgttcgcttcaggtcctttcttatttgagcttaatccaaataaaaagggacttgacaccttaccctgcatacaataggcaccccttacatgtgttttgagttggtctgaatctgaacatggggtgctttcagttcaggtagttagctagttctggccacattctgagtttcactgaagatgtggatcccttcagacataatgcacattgctttgtcctggatatgcaccttgcttgatttgaaatggatgccaagccaaaattgttggcattcaggagggataagcaggcttctaaaaataacagcatctgcagagttttcttcttccatccaaacaagttgtgtttcgatggtccacatgaccaggtgtatgtctgtaagtgtggagggagaggacaagaaattgtgcatgtgtgtgcagacatgcacaaacaggagcaatccaataacaccttagtgaatagaaatatggttggggatttgctgagctgtatttatccagcaacaggtttccagccccagatgttagtagtgcaaaagggccaagtgcctcaattgtgagcctctgagctaggaggagaagtgatgaagagtggcctatgtggtcccttctacctgaccttaagtcatctcaaaatgaaatattgtgagaatgaagggaacccttagggaaccttgtgggtaaggtaagtggacatggatttgtcagtagcctgttcctactgtgccatgttaatcttggtgcgaaaaactattccaatacatctcaaactccaagagacttcagaaacatcaagatttagtgtaatgagcggcgcagaaaaatgttttcattgctccataatctgaccacacgtaacatttgtgacgtgaaaaccatgactttctcattctgaggtctttggtttctgcctgtgggaaattgaatggcactgtatggactatttcatctgttgatggtaaaacaaaagggtgatttttttgcttgtggttgtcatcttgggtttacctttgtaagaagacatcatcaccattctgaaggcagtggcttggcatggagatttttattctgtagcactgggcctgttcttctaaggacagcacaaggtagacaattgtagagccaaggccactttttcaggaagatctagtctcttgctaaccctcttctttctctcttgctattgctgctgctcttttgatggtttatagtcttaatggcctgccttgataattcctttgaacactttcattagttgttttgcataccagagatgccgcacctgctgttggcttatttttttacttgttctattaactgttgattatctgaatgtttcccctcctccttgtttcatgtcccaagaatggtgctcctgttttcagtgacagttcagctgaacatataagcagatgtgtaaacagatgaagtaaccatgcagtttccttgtggcattagttccatttcacaaagtgaagaccactggtgggctgatctgagtgtgccaatcctgatcatttaaacctacagccttcaactggtgattcctacccaccgttttcattctgctataaccctgtgatatgtgtgcgtgtgggtgtgagtgtgggtgtgtgcacatatagagatttagtcttaatttcaaccaaatgacatgcaagattccactgccactcttcctggccaaaagtgtgcacagactgtgatttattcattgtggtctgtgactttaacccatcattgatgctctcacttaggtaaaccctaaagaccaaactagcaacactagtcaagggagtgactggagttatttctggtagcagtagccactggcatcctagaaacacatggacatttgtagcatgaattgacctattggtagtgcaatagctatacatgatttttattcttggcaaaagaaaatgcttcaaaaaaaaagtgatcaaacctgcacattgatcctgtaatagcaaatggaaggctatttctctgtactagcatttcagctttatgtgggaaagttacccgttctcctgcaagtacaatcaacccttgatgacttaagtattaattattctgggtgtagctcacccaagttttcttcctacatcttttggctaattccaccacacctcagcatcacagtcagatgggaaaaggggcaggtggattctcatgtcatgccttcttgtaccttattttcaagttttgtggtggaggaggtttaattatctgctcaagaatctggtatatatagccaggtgcggtggctcatgcctgtaatcccaggactttgggcaaggcgagaggatcacctgaggtcaggagttcaagaccagcctggccaacatggcaaaaccccatctctactaaaaatacaaaaattagctgggtttggtggtggacacctgtagtcccagctacttgggaggctgcggcaggagaatcacttgaaccccggaagtggaggttgcagtgagccaagatcgtgccattgcactccagcttgggtgaccgagcaagactccgtctcaaaaaaaaaaaaaaaatcggctatatgtaaaaactattaattatgtaacctcactccaatactgtactgatcaagatctgcccactcctagaggactgacccaatggcagatcccctactataatctttctgacaactcagtgacaggtaaaatcactctaatattcctaaaatatctagacacttgaattagaaatacagaaccacccccacccctgccattgcttaagccatattaaagcttcatgtactgtaaagtcagggatgtactgtgatactttaagaccactaatctcagtggaatttcaggacatagcattagttggtaaattacaccagactaggggctcactcctccttagattgaagtccaaataaaagtcttcacctttggatcaaaggccacatatatatgatcatcatcaataaattgtcataaagtgtctatgaactgctcttgccatcttcctaatacgtaacttcatgacatcatgtctctagaagtgcttaatacaatccaaaagaacaaggggggaaggccccaagtcaccactgaccgacctcagcaggggccagtggtagaacaacaatcttgtgaattaggagacatagaaaatgtacgcaaaagtaaattccaagcgctgagcatgtacaagctatttttattattaaaagccaagaaggaagagcattgaagaagtaatgattttaatatagtgggggatttcccccttaaatttttataatttccttgtgaataaacaatcatggaaaagaagaaacctagtcatacaaaatcagaataaataaaaatcttaagactggatccacatctttggccaattcatataagcacctaatacatcaatttctctgtacttaaaatgaagagaataattaatattcttaagtacaatgttttcaatagagaacaaatgaaatcacctttgtcatcaacagcagcccagactgactgtatctagatcacaccttgatgttacgtttgaatgcagtcagtagttaccaaaaagtaattagtgcacattaaatagtggtaaaatcagcagggagaaatatgggattagcacgtagttccagaaccttcctcctcctccagagtgcaactcaacaaacagtacactccaaattaagaatcaatgtttcatcccaggacaaacggtgttgctcccatcacagtaccacaactgagatactgtgaagtcattgcactaccagtaggttactactcttttgaagttactgtttttaaatcctaaaatatgtccccagttttctacattcattcttcttcccctaagagttgctagaagcagatgaaggatccctattgactctgcagggtttgatttcagtaccttagacagctatctggtgacttcccagtaggcacgaacaaccccttctctccccttgcagtcggtgggcttgatgacgccccagacagtatcctttccttctctactgccgccaaaataaacattagggaaatgggatcattaacaccactgagaaaggagtttacagggatcgcaatagtaactgtctgcttgtggtagtagaaagcttgtgccaggctgcatgaatagaaattaatgttaaactcctgttagacgagtaatatgtagatttttattgaaacagaccacagcttattaaaaagtactcagtgcaatggtatatacatatatacagatagaaaaaaatataactgtgatctttttgtcttacgccattactggaaacacccaaacgtgaactggagttccctctgaacaaaaccattgtcaaatcttcaacatatgacctccaaatctaggtgccaagtgccctgtgacagttgtttacacacctgaaaaatgtatcctggaagctgtaatcttgggcctgggctatgtgttgaaacaagcaaaagagacacatcgtgaccaaccaagctggtggaggaaaagcacaaaattcaactccaacctgcagttaggatcccaaagagatgttgacatttatagccaaaaagaaaaagtacatatatatatatatatatatatatatatatatatatatatatatatatctgaatcagatcgaagcagccaacgtccagcttcactcaagaaggacaaggaataaacaacattctctagctgtgtcatgttgtctcagtttttgaatctcaaccaggactgatccaccttcatcagatacgttttttaatggcgcaacaactcaattttggtcccagactctccattctgcactggccacgagaacaacaagagaatgacaggatgttaatggaggaaacattttcatggcaagctcagaaactgaagtgtttatattcagaatcagatgagctttaatatgaatttgcatcttgcctctgtactgcttgctattttttaatgataggagaaagcataacagtttattttaaatatgaaatatattgatatattataaaatatattgtaactttcaattaacattttgtatcaaactagtgtttagcaggtccactgtcagcctgctctcccaatgactgtttctgagtacacatcactgttagtgattgccgggcacccagaaaaagggtcctcctaccacagcctactgaactgccatattctaattctccaaggcctgggtattagagacaaaagaacattattccaagagtagaggaataattctaccctaaattctatcaagccatttcagaagagattttaaaagccatcactcctttagtagctctgcaaagccagtttaataaaagttcaggctctttctatataaattcaaaggcctcattacataaattatataagtctcaaacctagccaaccagttttcctttgacaatgtcagaattggacataagaaagagtcctgttttcctgtaacttaaaatactcaaaatcctaggcattctgagtttctccatgtacgtgaaaccggggtcggctttccaaactacacaaggcccaacaagagtccagtgtgcagatgtgcttttctaaattggcaatacccttgagggagcaaggttcccacatgtttatcaaggacatggagcccagctcctaagggagtgatgggaggagccggcaggacatgaacagccagagccagcaaagagccgggctgccttttctgctagcttcctctagctgggaggaaataaagggttcccgttgagatattgtcctttatagcaaaattaagcaactcatggaatctacacccctctttctctacagagcagctgagacatacatgtagaagttctcagttccctccttcatatggctaaggcactacttctagatgaaaacaggatgtgttcggttacagaataaagattttctagaatcagtgagcctcttctcacctgggaccctcacttgctgttgttgctttggtgcaatattgtacaggtgcaaaccaggttgcatcggggcagattaactgagcctatgtgtctcttcccttcccaagccctgaaaattcacatagatttacagatagtgcaaaacaacaagttttctcctgggaaaaggctggaatccttcaaatttcaatttatatgagcttaaaggtatataagtcatggggctcactgacattaggtattcatgctgtttgaaagagaaatgtctaaatgcccgttttcagtctgtttgtgtagctgagccctaacttgtacacaagttttcttgttatggagctaaattctctcagtgcctgtattactcctcagttatatgttaggccgagctccactaaagccatctgaactccagggcacttgtttttatcaggttacttactcaccggataatggaaattggcttattttcaattttacaattgactgatgaatgtattggtggtaattgatttatttcttcacttttttttgctactaaatgattttttcttttttaaaattattattattattattttgagatggagtctcactctgtcgcccaggctggagtgcagtggcgccatctcagctcactgcaagctctgcctcctgggttcatgcaattctcctgcctcagcctcccgagtagctgggattacaggtgcgtgccaccacgaccagctaatttttttgtatttttagtagagacagggtttcatcatgttaaccaggatggtctcgatctcctgacctcgtgatccacctgcctgggcctcccaaagtgagccactgtgcctggcccagtaagtgcttttttcttttggtttttccttctaacactgctcagaccaagacttacatttataaagagcaaatatattctgacctttcccctcaaagttgtattccatctagaatcaaggaaacaaatgcaaattcatcatttggggaaagcagacctcttgacagtaattcaagtccatggctatatgctaacccttgctactcaaagtgtggtccacagaccagcagcgttagcatcatctgtaagcttgttagaaatgcagaatctcaggccccacatcaaaccttcttcatcagaattggccttttaacaaatccccaggtgacctgtatgcaccagaaatattgataagcactggcctcacctcaccgtagtgataactaacctcgttaataattagagaatgaagctatctcttccttgagtctcatttacagaattatttgaagatgtgaaggtcctgaatgatcataaggattaaaaaaatgcatctttaaattccacttgaggttatataacttggatggtctacatcaaacataataaagtcaataagagatagtctttttccggtcttacctaaatagcactccatatccttgagccacctcaaagcccccatttttaagttttagtctttttttttttagaccagactagcaaagccatcagaatatcaggtggaacctcagggcaggtcctctggaaggctacaggagtctctgcttagcatagtacagaaattgttgtgtttctcgatccttgtgttcttcccttgaggaactcagcatctcaccagtaagaactcccctcccctagaggaaaatagcaagagaagttagtttaaccatctagaaacattgctaatctccttgaaagccaattctcttactcattgcaccaacaagaaacactccaaggtgggcaaggaaagacgtgaattctgatattggcgccataactcgatatgtacccagaaacagttatgttctaaattaatggctttaacctgttcattgtaaaaagtgccttggacttcaatctaaagaggtcagtataaatatgtatgtgtgtgtgtgacgtgtatgtaggcaaatatttacagatttatacatacataggtgcacacacatatacccgcacattcatatataatatatacatacatatataaatgcttcataatatatcatattgctattcacagctccatttcttttgtctggtcctatgtttatttgtttagtgagacctttacatagagaggttctattcggaacattgatgtattttttgtttgttttttactttttattaaaaaggtaaaggatattaaaaaaaaaaaaaaaagtcaagtgcctgaaggttttgaatggagttacggtaaactttctcaggtcaccaaagaggaaacatttttcctttggaaaacatttttctgtttcagtgactttgttttcccttggtggtaatgcataaataagagtggttaaagtgattttgtaagttttatttcaatccatttctgtggttcccataaggcaatagctaaaaatttgttcagtctagtgcccagttttctccacacatcagcatcagaagggcccggtcttcacatgctctgtgtggttttgttcgcgttgttactgtgttccttactaaggaaaggcaaatgaaattgcaggggctggagcttagaccagctccaaatatggcttccttttggtaacacacacagaaggtggactagtgggaagtctctctccctgaagcaggtgggaacctgtgtcttagaaggcagaggagtcccagtgaactctccacagctccatgggccctgcctgtctacagttatacaactgcctgtatgagtcagcctttctctaccttagccaaaggtcttctctttctgtggtgtgacagcttgtaatgaaccaacttgctctggttagaagtccctagagctccaggaagagtcgccaggtttccattgctgtgctcaaagctcaaggacacattatacttctttaaaccaactaaatctctctagctccctgcccccatggtgacactttcataataggcagggccaagtcagagaggtcatgccctgtatacagtgtcaatcagaagagacactgcaaaatgtcagaggtgaccagaaagacaacagatctctccagctgtcctcacagctgcaggcacatttgtggaattgtgagtaggaaggcttggcagccaggggatgggaaatgaatttccccaagttgaaaaccctgtacccttactttccttcccataaatttttctgtagttctaggtaaataataataataataaaaatgcaaattaggtgctttagaaggagtatgtaatatctgggactttttctaagttggtagacctaaaaaatgttttcaaaaatatatctagctgcatttctactgctgtcattccttaaagctcttcctccaaaaactccatatgaatgaatacatttaccaactcagtgattactaaataatagtactttatacttatacacagtaatacctttcatctaaggatctcaaatgccaatatattagtcatcaccctgtaaggtggatgacatattattcccattattccaatgggaaaattgggccatagaaaactgaggagcaaatgactcatctacaggaattaaatggaaaaaacaggctaggatttctcagcacactttaggagtgaatgaaaacttacaggcttcagttctactgctggccaccattggatttgtaagatccaggatgtgtattgaccacatgtgtccagacccaggcttagggcatctggaatgagagtggtgggctggtgtgtgggtctgaggatctggatgggagactgcattttcttctctgtgcaaaatatggaagtgtgaccttgaaggtgggcttagtctatggccttccccactcctgcttgaactgaagctggagagaatgggcatttttaaatgttacggcatatgctaatataatattatggcattaaataaaaacaagaagagaactgactaaaaccaaaaaaaaaaaaaaaaa

SEQ ID NO: 4290 - DNA, 4325 bp, Homo sapiens
  source 1..4325: mol_type = genomic DNA
cacaggtcacggggcggggccgaggcggaagcgcccgcagcccggtaccggctcctcctgggctccctctagcgccttccccccggcccgactccgctggtcagcgccaagtgacttacgcccccgaccctgagcccggaccgctaggcgaggaggatcagatctccgctcgagaatctgaaggtgccctggtcctggaggagttccgtcccagcccgcggtctcccggtactgtcgggccccggccctctggagcttcaggaggcggccgtcagggtcggggagtatttgggtccggggtctcagggaagggcggcgcctgggtctgcggtatcggaaagagcctgctggagccaagtagccctccctctcttgggacagacccctcggtcccatgtccatgggggcaccgcggtccctcctcctggccctggctgctggcctggccgttgcccgtccgcccaacatcgtgctgatctttgccgacgacctcggctatggggacctgggctgctatgggcaccccagctctaccactcccaacctggaccagctggcggcgggagggctgcggttcacagacttctacgtgcctgtgtctctgtgcacaccctctagggccgccctcctgaccggccggctcccggttcggatgggcatgtaccctggcgtcctggtgcccagctcccgggggggcctgcccctggaggaggtgaccgtggccgaagtcctggctgcccgaggctacctcacaggaatggccggcaagtggcaccttggggtggggcctgagggggccttcctgcccccccatcagggcttccatcgatttctaggcatcccgtactcccacgaccagggcccctgccagaacctgacctgcttcccgccggccactccttgcgacggtggctgtgaccagggcctggtccccatcccactgttggccaacctgtccgtggaggcgcagcccccctggctgcccggactagaggcccgctacatggctttcgcccatgacctcatggccgacgcccagcgccaggatcgccccttcttcctgtactatgcctctcaccacacccactaccctcagttcagtgggcagagctttgcagagcgttcaggccgcgggccatttggggactccctgatggagctggatgcagctgtggggaccctgatgacagccataggggacctggggctgcttgaagagacgctggtcatcttcactgcagacaatggacctgagaccatgcgtatgtcccgaggcggctgctccggtctcttgcggtgtggaaagggaacgacctacgagggcggtgtccgagagcctgccttggccttctggccaggtcatatcgctcccggcgtgacccacgagctggccagctccctggacctgctgcctaccctggcagccctggctggggccccactgcccaatgtcaccttggatggctttgacctcagccccctgctgctgggcacaggcaagagccctcggcagtctctcttcttctacccgtcctacccagacgaggtccgtggggtttttgctgtgcggactggaaagtacaaggctcacttcttcacccagggctctgcccacagtgataccactgcagaccctgcctgccacgcctccagctctctgactgctcatgagcccccgctgctctatgacctgtccaaggaccctggtgagaactacaacctgctggggggtgtggccggggccaccccagaggtgctgcaagccctgaaacagcttcagctgctcaaggcccagttagacgcagctgtgaccttcggccccagccaggtggcccggggcgaggaccccgccctgcagatctgctgtcatcctggctgcaccccccgcccagcttgctgccattgcccagatccccatgcctgagggcccctcggctggcctgggcatgtgatggctcctcactgggagcctgtgggggaggctcaggtgtctggagggggtttgtgcctgataacgtaataacaccagtggagacttgcagatgtgacaattcgtccaatcctggggtaatgctgtgtgctggtgccggtcccctgtggtacgaatgaggaaactgaggtgcagagaggttcaggacttgtacaagatcacccagccagaaagaggttgggctgggatttgaaccctggtgtcgtggctctggaagctgccctggcgccttggtgatctgcgtgggtcagtgcacacaggcacacgtcagcctcaaggacatgggcacatctgttcacaggagcagcgccacgtgcctttgagtgccaggaacggggtgggagggtgggagggtgtgagggccagaagactcagaagatgcaaagtgcctgagagagacgggatattcccccagaagaagcattcttagagacacaggcactggacctccttggttcttataagaaacctgtctgaagctgggtgatgagttgcacactccaggtggggctaaggggcctggagcccctgctggctcctaggaaggcacagcagcaggccctgagacggctcctctggggcccctccaccctcccaggcctctgcatttcacctgtgcccacacttctgtctcctgccttcaccttttgacccactactaacgattctccacccagcagacaaagtgatctcttaaaaatatctgttggctgggcacggtggctcacgcctgtaatcccagcactttaggaagccgaggcgggtggatcacctgaggtcgggagttcgagaccagcctgaccaacatggagaaaccccatctctactaaaaatacaaaattagccaggtgtagtggtgcatccctgtaatcccagctacttgggagtctgaggctggagaatcacttgaacctgggaggcggtggttgcagtgagccgagatcgcaccattgcactccagcctgggcaacaagagaaaaactctgtctcaaaaaacaaaaaatctgttaggctgcacacggcgattcactcctgtattcccagtgctttgggaggctgaggtgagaggatgcctgaggccaggaattcagaccagcctgggcaacatagtgagaccccagctctaaagatttgtttttgttttttttttttttttttttttttttttttttttttttttgagacggagtctcgctctgtcgcccaggctagagtgcagtggtaccatctccgctcactgcaacctccgcctcccgggttccagggattctcctgcctcagcctccctagtagctggaactacaggtgtgtgctgccatgcccagctaatttttttttatttaatagagacaagatttcaccatgttggccaggctggtctcaaactcctgacctcaggtgatccacccgcctcagcctcccaaagtgctgggattacaggtgtgaaccaccacacctggccaacaatatttgttttaattagccaggcgtggtagcatttgtcctagcaatttgggaggttgaggtgggagaatcacttcagcccactaggtcgaggctgtagtgagctataattgtaccactgcactccagcctcggggacagagtgagaccctgtctgcaaataaacaaataaaacatcaggctgggcttgagcatctattcctgctcaaaatttcgcaggcttctcagaagaaaatccaaaccccttacagtgacccagtttgcccttgaggcctccacccacacccccttccccccagtcttagggggtggcctggctgttcccttcaacggcaacgctctgcctccattgttggcctcctctgcagggagggactgtctgagcacctgcccgtgtctgtgcagcatggcacactgacgtcaggcccacgtgcatgcccaggtggccagtcacacgccaggtgctccctcagtgttggccaagtgagaggagcacaccttccgggcgttcagacacctccccgtggcagacaccgttcgttgctaccaaacagccacctccttcctaatgggctcccatttttcagtgctgggcaaaggtcccttgatcttggagttgcagcctctttctctccaaggagggcggtgaccagcctgagccagtcaatccagtgattggttcaggagtagcctgtgaccaggagtcctggtagtgaacgactggggcagccctgggggtgaggaccttgcgcagccgtcacaggccctgattggacactgggcagctgctaacccagtgtctccagctgcctacctggagagctccaagcgtaagaaaataaaccctgcctgttgaagccaaaaaaaaaaa

SEQ ID NO: 4291 - DNA, 3935 bp, Homo sapiens
  source 1..3935: mol_type = genomic DNA
cacaggtcacggggcggggccgaggcggaagcgcccgcagcccggtaccggctcctcctgggctccctctagcgccttccccccggcccgactccgctggtcagcgccaagtgacttacgcccccgaccctgagcccggaccgctaggcgaggaggatcagatctccgctcgagaatctgaaggtgccctggtcctggaggagttccgtcccagcccgcggtctcccgggccgccctcctgaccggccggctcccggttcggatgggcatgtaccctggcgtcctggtgcccagctcccgggggggcctgcccctggaggaggtgaccgtggccgaagtcctggctgcccgaggctacctcacaggaatggccggcaagtggcaccttggggtggggcctgagggggccttcctgcccccccatcagggcttccatcgatttctaggcatcccgtactcccacgaccagggcccctgccagaacctgacctgcttcccgccggccactccttgcgacggtggctgtgaccagggcctggtccccatcccactgttggccaacctgtccgtggaggcgcagcccccctggctgcccggactagaggcccgctacatggctttcgcccatgacctcatggccgacgcccagcgccaggatcgccccttcttcctgtactatgcctctcaccacacccactaccctcagttcagtgggcagagctttgcagagcgttcaggccgcgggccatttggggactccctgatggagctggatgcagctgtggggaccctgatgacagccataggggacctggggctgcttgaagagacgctggtcatcttcactgcagacaatggacctgagaccatgcgtatgtcccgaggcggctgctccggtctcttgcggtgtggaaagggaacgacctacgagggcggtgtccgagagcctgccttggccttctggccaggtcatatcgctcccggcgtgacccacgagctggccagctccctggacctgctgcctaccctggcagccctggctggggccccactgcccaatgtcaccttggatggctttgacctcagccccctgctgctgggcacaggcaagagccctcggcagtctctcttcttctacccgtcctacccagacgaggtccgtggggtttttgctgtgcggactggaaagtacaaggctcacttcttcacccagggctctgcccacagtgataccactgcagaccctgcctgccacgcctccagctctctgactgctcatgagcccccgctgctctatgacctgtccaaggaccctggtgagaactacaacctgctggggggtgtggccggggccaccccagaggtgctgcaagccctgaaacagcttcagctgctcaaggcccagttagacgcagctgtgaccttcggccccagccaggtggcccggggcgaggaccccgccctgcagatctgctgtcatcctggctgcaccccccgcccagcttgctgccattgcccagatccccatgcctgagggcccctcggctggcctgggcatgtgatggctcctcactgggagcctgtgggggaggctcaggtgtctggagggggtttgtgcctgataacgtaataacaccagtggagacttgcagatgtgacaattcgtccaatcctggggtaatgctgtgtgctggtgccggtcccctgtggtacgaatgaggaaactgaggtgcagagaggttcaggacttgtacaagatcacccagccagaaagaggttgggctgggatttgaaccctggtgtcgtggctctggaagctgccctggcgccttggtgatctgcgtgggtcagtgcacacaggcacacgtcagcctcaaggacatgggcacatctgttcacaggagcagcgccacgtgcctttgagtgccaggaacggggtgggagggtgggagggtgtgagggccagaagactcagaagatgcaaagtgcctgagagagacgggatattcccccagaagaagcattcttagagacacaggcactggacctccttggttcttataagaaacctgtctgaagctgggtgatgagttgcacactccaggtggggctaaggggcctggagcccctgctggctcctaggaaggcacagcagcaggccctgagacggctcctctggggcccctccaccctcccaggcctctgcatttcacctgtgcccacacttctgtctcctgccttcaccttttgacccactactaacgattctccacccagcagacaaagtgatctcttaaaaatatctgttggctgggcacggtggctcacgcctgtaatcccagcactttaggaagccgaggcgggtggatcacctgaggtcgggagttcgagaccagcctgaccaacatggagaaaccccatctctactaaaaatacaaaattagccaggtgtagtggtgcatccctgtaatcccagctacttgggagtctgaggctggagaatcacttgaacctgggaggcggtggttgcagtgagccgagatcgcaccattgcactccagcctgggcaacaagagaaaaactctgtctcaaaaaacaaaaaatctgttaggctgcacacggcgattcactcctgtattcccagtgctttgggaggctgaggtgagaggatgcctgaggccaggaattcagaccagcctgggcaacatagtgagaccccagctctaaagatttgtttttgttttttttttttttttttttttttttttttttttttttttgagacggagtctcgctctgtcgcccaggctagagtgcagtggtaccatctccgctcactgcaacctccgcctcccgggttccagggattctcctgcctcagcctccctagtagctggaactacaggtgtgtgctgccatgcccagctaatttttttttatttaatagagacaagatttcaccatgttggccaggctggtctcaaactcctgacctcaggtgatccacccgcctcagcctcccaaagtgctgggattacaggtgtgaaccaccacacctggccaacaatatttgttttaattagccaggcgtggtagcatttgtcctagcaatttgggaggttgaggtgggagaatcacttcagcccactaggtcgaggctgtagtgagctataattgtaccactgcactccagcctcggggacagagtgagaccctgtctgcaaataaacaaataaaacatcaggctgggcttgagcatctattcctgctcaaaatttcgcaggcttctcagaagaaaatccaaaccccttacagtgacccagtttgcccttgaggcctccacccacacccccttccccccagtcttagggggtggcctggctgttcccttcaacggcaacgctctgcctccattgttggcctcctctgcagggagggactgtctgagcacctgcccgtgtctgtgcagcatggcacactgacgtcaggcccacgtgcatgcccaggtggccagtcacacgccaggtgctccctcagtgttggccaagtgagaggagcacaccttccgggcgttcagacacctccccgtggcagacaccgttcgttgctaccaaacagccacctccttcctaatgggctcccatttttcagtgctgggcaaaggtcccttgatcttggagttgcagcctctttctctccaaggagggcggtgaccagcctgagccagtcaatccagtgattggttcaggagtagcctgtgaccaggagtcctggtagtgaacgactggggcagccctgggggtgaggaccttgcgcagccgtcacaggccctgattggacactgggcagctgctaacccagtgtctccagctgcctacctggagagctccaagcgtaagaaaataaaccctgcctgttgaagccaaaaaaaaaaa

SEQ ID NO: 4292 - DNA, 4172 bp, Homo sapiens
  source 1..4172: mol_type = genomic DNA
cacaggtcacggggcggggccgaggcggaagcgcccgcagcccggtaccggctcctcctgggctccctctagcgccttccccccggcccgactccgctggtcagcgccaagtgacttacgcccccgaccctgagcccggaccgctaggcgaggaggatcagatctccgctcgagaatctgaaggtgccctggtcctggaggagttccgtcccagcccgcggtctcccgacccctcggtcccatgtccatgggggcaccgcggtccctcctcctggccctggctgctggcctggccgttgcccgtccgcccaacatcgtgctgatctttgccgacgacctcggctatggggacctgggctgctatgggcaccccagctctaccactcccaacctggaccagctggcggcgggagggctgcggttcacagacttctacgtgcctgtgtctctgtgcacaccctctagggccgccctcctgaccggccggctcccggttcggatgggcatgtaccctggcgtcctggtgcccagctcccgggggggcctgcccctggaggaggtgaccgtggccgaagtcctggctgcccgaggctacctcacaggaatggccggcaagtggcaccttggggtggggcctgagggggccttcctgcccccccatcagggcttccatcgatttctaggcatcccgtactcccacgaccagggcccctgccagaacctgacctgcttcccgccggccactccttgcgacggtggctgtgaccagggcctggtccccatcccactgttggccaacctgtccgtggaggcgcagcccccctggctgcccggactagaggcccgctacatggctttcgcccatgacctcatggccgacgcccagcgccaggatcgccccttcttcctgtactatgcctctcaccacacccactaccctcagttcagtgggcagagctttgcagagcgttcaggccgcgggccatttggggactccctgatggagctggatgcagctgtggggaccctgatgacagccataggggacctggggctgcttgaagagacgctggtcatcttcactgcagacaatggacctgagaccatgcgtatgtcccgaggcggctgctccggtctcttgcggtgtggaaagggaacgacctacgagggcggtgtccgagagcctgccttggccttctggccaggtcatatcgctcccggcgtgacccacgagctggccagctccctggacctgctgcctaccctggcagccctggctggggccccactgcccaatgtcaccttggatggctttgacctcagccccctgctgctgggcacaggcaagagccctcggcagtctctcttcttctacccgtcctacccagacgaggtccgtggggtttttgctgtgcggactggaaagtacaaggctcacttcttcacccagggctctgcccacagtgataccactgcagaccctgcctgccacgcctccagctctctgactgctcatgagcccccgctgctctatgacctgtccaaggaccctggtgagaactacaacctgctggggggtgtggccggggccaccccagaggtgctgcaagccctgaaacagcttcagctgctcaaggcccagttagacgcagctgtgaccttcggccccagccaggtggcccggggcgaggaccccgccctgcagatctgctgtcatcctggctgcaccccccgcccagcttgctgccattgcccagatccccatgcctgagggcccctcggctggcctgggcatgtgatggctcctcactgggagcctgtgggggaggctcaggtgtctggagggggtttgtgcctgataacgtaataacaccagtggagacttgcagatgtgacaattcgtccaatcctggggtaatgctgtgtgctggtgccggtcccctgtggtacgaatgaggaaactgaggtgcagagaggttcaggacttgtacaagatcacccagccagaaagaggttgggctgggatttgaaccctggtgtcgtggctctggaagctgccctggcgccttggtgatctgcgtgggtcagtgcacacaggcacacgtcagcctcaaggacatgggcacatctgttcacaggagcagcgccacgtgcctttgagtgccaggaacggggtgggagggtgggagggtgtgagggccagaagactcagaagatgcaaagtgcctgagagagacgggatattcccccagaagaagcattcttagagacacaggcactggacctccttggttcttataagaaacctgtctgaagctgggtgatgagttgcacactccaggtggggctaaggggcctggagcccctgctggctcctaggaaggcacagcagcaggccctgagacggctcctctggggcccctccaccctcccaggcctctgcatttcacctgtgcccacacttctgtctcctgccttcaccttttgacccactactaacgattctccacccagcagacaaagtgatctcttaaaaatatctgttggctgggcacggtggctcacgcctgtaatcccagcactttaggaagccgaggcgggtggatcacctgaggtcgggagttcgagaccagcctgaccaacatggagaaaccccatctctactaaaaatacaaaattagccaggtgtagtggtgcatccctgtaatcccagctacttgggagtctgaggctggagaatcacttgaacctgggaggcggtggttgcagtgagccgagatcgcaccattgcactccagcctgggcaacaagagaaaaactctgtctcaaaaaacaaaaaatctgttaggctgcacacggcgattcactcctgtattcccagtgctttgggaggctgaggtgagaggatgcctgaggccaggaattcagaccagcctgggcaacatagtgagaccccagctctaaagatttgtttttgttttttttttttttttttttttttttttttttttttttttgagacggagtctcgctctgtcgcccaggctagagtgcagtggtaccatctccgctcactgcaacctccgcctcccgggttccagggattctcctgcctcagcctccctagtagctggaactacaggtgtgtgctgccatgcccagctaatttttttttatttaatagagacaagatttcaccatgttggccaggctggtctcaaactcctgacctcaggtgatccacccgcctcagcctcccaaagtgctgggattacaggtgtgaaccaccacacctggccaacaatatttgttttaattagccaggcgtggtagcatttgtcctagcaatttgggaggttgaggtgggagaatcacttcagcccactaggtcgaggctgtagtgagctataattgtaccactgcactccagcctcggggacagagtgagaccctgtctgcaaataaacaaataaaacatcaggctgggcttgagcatctattcctgctcaaaatttcgcaggcttctcagaagaaaatccaaaccccttacagtgacccagtttgcccttgaggcctccacccacacccccttccccccagtcttagggggtggcctggctgttcccttcaacggcaacgctctgcctccattgttggcctcctctgcagggagggactgtctgagcacctgcccgtgtctgtgcagcatggcacactgacgtcaggcccacgtgcatgcccaggtggccagtcacacgccaggtgctccctcagtgttggccaagtgagaggagcacaccttccgggcgttcagacacctccccgtggcagacaccgttcgttgctaccaaacagccacctccttcctaatgggctcccatttttcagtgctgggcaaaggtcccttgatcttggagttgcagcctctttctctccaaggagggcggtgaccagcctgagccagtcaatccagtgattggttcaggagtagcctgtgaccaggagtcctggtagtgaacgactggggcagccctgggggtgaggaccttgcgcagccgtcacaggccctgattggacactgggcagctgctaacccagtgtctccagctgcctacctggagagctccaagcgtaagaaaataaaccctgcctgttgaagccaaaaaaaaaaa

SEQ ID NO: 4293 - DNA, 4127 bp, Homo sapiens
  source 1..4127: mol_type = genomic DNA
cacaggtcacggggcggggccgaggcggaagcgcccgcagcccggtaccggctcctcctgggctccctctagcgccttccccccggcccgactccgctggtcagcgccaagtgacttacgcccccgaccctgagcccggaccgctaggcgaggaggatcagatctccgctcgagaatctgaagacccctcggtcccatgtccatgggggcaccgcggtccctcctcctggccctggctgctggcctggccgttgcccgtccgcccaacatcgtgctgatctttgccgacgacctcggctatggggacctgggctgctatgggcaccccagctctaccactcccaacctggaccagctggcggcgggagggctgcggttcacagacttctacgtgcctgtgtctctgtgcacaccctctagggccgccctcctgaccggccggctcccggttcggatgggcatgtaccctggcgtcctggtgcccagctcccgggggggcctgcccctggaggaggtgaccgtggccgaagtcctggctgcccgaggctacctcacaggaatggccggcaagtggcaccttggggtggggcctgagggggccttcctgcccccccatcagggcttccatcgatttctaggcatcccgtactcccacgaccagggcccctgccagaacctgacctgcttcccgccggccactccttgcgacggtggctgtgaccagggcctggtccccatcccactgttggccaacctgtccgtggaggcgcagcccccctggctgcccggactagaggcccgctacatggctttcgcccatgacctcatggccgacgcccagcgccaggatcgccccttcttcctgtactatgcctctcaccacacccactaccctcagttcagtgggcagagctttgcagagcgttcaggccgcgggccatttggggactccctgatggagctggatgcagctgtggggaccctgatgacagccataggggacctggggctgcttgaagagacgctggtcatcttcactgcagacaatggacctgagaccatgcgtatgtcccgaggcggctgctccggtctcttgcggtgtggaaagggaacgacctacgagggcggtgtccgagagcctgccttggccttctggccaggtcatatcgctcccggcgtgacccacgagctggccagctccctggacctgctgcctaccctggcagccctggctggggccccactgcccaatgtcaccttggatggctttgacctcagccccctgctgctgggcacaggcaagagccctcggcagtctctcttcttctacccgtcctacccagacgaggtccgtggggtttttgctgtgcggactggaaagtacaaggctcacttcttcacccagggctctgcccacagtgataccactgcagaccctgcctgccacgcctccagctctctgactgctcatgagcccccgctgctctatgacctgtccaaggaccctggtgagaactacaacctgctggggggtgtggccggggccaccccagaggtgctgcaagccctgaaacagcttcagctgctcaaggcccagttagacgcagctgtgaccttcggccccagccaggtggcccggggcgaggaccccgccctgcagatctgctgtcatcctggctgcaccccccgcccagcttgctgccattgcccagatccccatgcctgagggcccctcggctggcctgggcatgtgatggctcctcactgggagcctgtgggggaggctcaggtgtctggagggggtttgtgcctgataacgtaataacaccagtggagacttgcagatgtgacaattcgtccaatcctggggtaatgctgtgtgctggtgccggtcccctgtggtacgaatgaggaaactgaggtgcagagaggttcaggacttgtacaagatcacccagccagaaagaggttgggctgggatttgaaccctggtgtcgtggctctggaagctgccctggcgccttggtgatctgcgtgggtcagtgcacacaggcacacgtcagcctcaaggacatgggcacatctgttcacaggagcagcgccacgtgcctttgagtgccaggaacggggtgggagggtgggagggtgtgagggccagaagactcagaagatgcaaagtgcctgagagagacgggatattcccccagaagaagcattcttagagacacaggcactggacctccttggttcttataagaaacctgtctgaagctgggtgatgagttgcacactccaggtggggctaaggggcctggagcccctgctggctcctaggaaggcacagcagcaggccctgagacggctcctctggggcccctccaccctcccaggcctctgcatttcacctgtgcccacacttctgtctcctgccttcaccttttgacccactactaacgattctccacccagcagacaaagtgatctcttaaaaatatctgttggctgggcacggtggctcacgcctgtaatcccagcactttaggaagccgaggcgggtggatcacctgaggtcgggagttcgagaccagcctgaccaacatggagaaaccccatctctactaaaaatacaaaattagccaggtgtagtggtgcatccctgtaatcccagctacttgggagtctgaggctggagaatcacttgaacctgggaggcggtggttgcagtgagccgagatcgcaccattgcactccagcctgggcaacaagagaaaaactctgtctcaaaaaacaaaaaatctgttaggctgcacacggcgattcactcctgtattcccagtgctttgggaggctgaggtgagaggatgcctgaggccaggaattcagaccagcctgggcaacatagtgagaccccagctctaaagatttgtttttgttttttttttttttttttttttttttttttttttttttttgagacggagtctcgctctgtcgcccaggctagagtgcagtggtaccatctccgctcactgcaacctccgcctcccgggttccagggattctcctgcctcagcctccctagtagctggaactacaggtgtgtgctgccatgcccagctaatttttttttatttaatagagacaagatttcaccatgttggccaggctggtctcaaactcctgacctcaggtgatccacccgcctcagcctcccaaagtgctgggattacaggtgtgaaccaccacacctggccaacaatatttgttttaattagccaggcgtggtagcatttgtcctagcaatttgggaggttgaggtgggagaatcacttcagcccactaggtcgaggctgtagtgagctataattgtaccactgcactccagcctcggggacagagtgagaccctgtctgcaaataaacaaataaaacatcaggctgggcttgagcatctattcctgctcaaaatttcgcaggcttctcagaagaaaatccaaaccccttacagtgacccagtttgcccttgaggcctccacccacacccccttccccccagtcttagggggtggcctggctgttcccttcaacggcaacgctctgcctccattgttggcctcctctgcagggagggactgtctgagcacctgcccgtgtctgtgcagcatggcacactgacgtcaggcccacgtgcatgcccaggtggccagtcacacgccaggtgctccctcagtgttggccaagtgagaggagcacaccttccgggcgttcagacacctccccgtggcagacaccgttcgttgctaccaaacagccacctccttcctaatgggctcccatttttcagtgctgggcaaaggtcccttgatcttggagttgcagcctctttctctccaaggagggcggtgaccagcctgagccagtcaatccagtgattggttcaggagtagcctgtgaccaggagtcctggtagtgaacgactggggcagccctgggggtgaggaccttgcgcagccgtcacaggccctgattggacactgggcagctgctaacccagtgtctccagctgcctacctggagagctccaagcgtaagaaaataaaccctgcctgttgaagccaaaaaaaaaaa

SEQ ID NO: 4294 - DNA, 4220 bp, Homo sapiens
  source 1..4220: mol_type = genomic DNA
cacaggtcacggggcggggccgaggcggaagcgcccgcagcccggtaccggctcctcctgggctccctctagcgccttccccccggcccgactccgctggtcagcgccaagtgacttacgcccccgaccctgagcccggaccgctaggcgaggaggatcagatctccgctcgagaatctgaaggtgccctggtcctggaggagttccgtcccagcccgcggtctcccggtactgtcgggccccggccctctggagcttcaggaggcggccgtcaggacccctcggtcccatgtccatgggggcaccgcggtccctcctcctggccctggctgctggcctggccgttgcccgtccgcccaacatcgtgctgatctttgccgacgacctcggctatggggacctgggctgctatgggcaccccagctctaccactcccaacctggaccagctggcggcgggagggctgcggttcacagacttctacgtgcctgtgtctctgtgcacaccctctagggccgccctcctgaccggccggctcccggttcggatgggcatgtaccctggcgtcctggtgcccagctcccgggggggcctgcccctggaggaggtgaccgtggccgaagtcctggctgcccgaggctacctcacaggaatggccggcaagtggcaccttggggtggggcctgagggggccttcctgcccccccatcagggcttccatcgatttctaggcatcccgtactcccacgaccagggcccctgccagaacctgacctgcttcccgccggccactccttgcgacggtggctgtgaccagggcctggtccccatcccactgttggccaacctgtccgtggaggcgcagcccccctggctgcccggactagaggcccgctacatggctttcgcccatgacctcatggccgacgcccagcgccaggatcgccccttcttcctgtactatgcctctcaccacacccactaccctcagttcagtgggcagagctttgcagagcgttcaggccgcgggccatttggggactccctgatggagctggatgcagctgtggggaccctgatgacagccataggggacctggggctgcttgaagagacgctggtcatcttcactgcagacaatggacctgagaccatgcgtatgtcccgaggcggctgctccggtctcttgcggtgtggaaagggaacgacctacgagggcggtgtccgagagcctgccttggccttctggccaggtcatatcgctcccggcgtgacccacgagctggccagctccctggacctgctgcctaccctggcagccctggctggggccccactgcccaatgtcaccttggatggctttgacctcagccccctgctgctgggcacaggcaagagccctcggcagtctctcttcttctacccgtcctacccagacgaggtccgtggggtttttgctgtgcggactggaaagtacaaggctcacttcttcacccagggctctgcccacagtgataccactgcagaccctgcctgccacgcctccagctctctgactgctcatgagcccccgctgctctatgacctgtccaaggaccctggtgagaactacaacctgctggggggtgtggccggggccaccccagaggtgctgcaagccctgaaacagcttcagctgctcaaggcccagttagacgcagctgtgaccttcggccccagccaggtggcccggggcgaggaccccgccctgcagatctgctgtcatcctggctgcaccccccgcccagcttgctgccattgcccagatccccatgcctgagggcccctcggctggcctgggcatgtgatggctcctcactgggagcctgtgggggaggctcaggtgtctggagggggtttgtgcctgataacgtaataacaccagtggagacttgcagatgtgacaattcgtccaatcctggggtaatgctgtgtgctggtgccggtcccctgtggtacgaatgaggaaactgaggtgcagagaggttcaggacttgtacaagatcacccagccagaaagaggttgggctgggatttgaaccctggtgtcgtggctctggaagctgccctggcgccttggtgatctgcgtgggtcagtgcacacaggcacacgtcagcctcaaggacatgggcacatctgttcacaggagcagcgccacgtgcctttgagtgccaggaacggggtgggagggtgggagggtgtgagggccagaagactcagaagatgcaaagtgcctgagagagacgggatattcccccagaagaagcattcttagagacacaggcactggacctccttggttcttataagaaacctgtctgaagctgggtgatgagttgcacactccaggtggggctaaggggcctggagcccctgctggctcctaggaaggcacagcagcaggccctgagacggctcctctggggcccctccaccctcccaggcctctgcatttcacctgtgcccacacttctgtctcctgccttcaccttttgacccactactaacgattctccacccagcagacaaagtgatctcttaaaaatatctgttggctgggcacggtggctcacgcctgtaatcccagcactttaggaagccgaggcgggtggatcacctgaggtcgggagttcgagaccagcctgaccaacatggagaaaccccatctctactaaaaatacaaaattagccaggtgtagtggtgcatccctgtaatcccagctacttgggagtctgaggctggagaatcacttgaacctgggaggcggtggttgcagtgagccgagatcgcaccattgcactccagcctgggcaacaagagaaaaactctgtctcaaaaaacaaaaaatctgttaggctgcacacggcgattcactcctgtattcccagtgctttgggaggctgaggtgagaggatgcctgaggccaggaattcagaccagcctgggcaacatagtgagaccccagctctaaagatttgtttttgttttttttttttttttttttttttttttttttttttttttgagacggagtctcgctctgtcgcccaggctagagtgcagtggtaccatctccgctcactgcaacctccgcctcccgggttccagggattctcctgcctcagcctccctagtagctggaactacaggtgtgtgctgccatgcccagctaatttttttttatttaatagagacaagatttcaccatgttggccaggctggtctcaaactcctgacctcaggtgatccacccgcctcagcctcccaaagtgctgggattacaggtgtgaaccaccacacctggccaacaatatttgttttaattagccaggcgtggtagcatttgtcctagcaatttgggaggttgaggtgggagaatcacttcagcccactaggtcgaggctgtagtgagctataattgtaccactgcactccagcctcggggacagagtgagaccctgtctgcaaataaacaaataaaacatcaggctgggcttgagcatctattcctgctcaaaatttcgcaggcttctcagaagaaaatccaaaccccttacagtgacccagtttgcccttgaggcctccacccacacccccttccccccagtcttagggggtggcctggctgttcccttcaacggcaacgctctgcctccattgttggcctcctctgcagggagggactgtctgagcacctgcccgtgtctgtgcagcatggcacactgacgtcaggcccacgtgcatgcccaggtggccagtcacacgccaggtgctccctcagtgttggccaagtgagaggagcacaccttccgggcgttcagacacctccccgtggcagacaccgttcgttgctaccaaacagccacctccttcctaatgggctcccatttttcagtgctgggcaaaggtcccttgatcttggagttgcagcctctttctctccaaggagggcggtgaccagcctgagccagtcaatccagtgattggttcaggagtagcctgtgaccaggagtcctggtagtgaacgactggggcagccctgggggtgaggaccttgcgcagccgtcacaggccctgattggacactgggcagctgctaacccagtgtctccagctgcctacctggagagctccaagcgtaagaaaataaaccctgcctgttgaagccaaaaaaaaaaa

SEQ ID NO: 4295 - DNA, 2104 bp, Homo sapiens
  source 1..2104: mol_type = genomic DNA
cacgtgaccaaccgggtcacatggcccgcgggacaacatggctgcgcccgcactagggctggtgtgtggacgttgccctgagctgggtctcgtcctcttgctgctgctgctctcgctgctgtgtggagcggcagggagccaggaggccgggaccggtgcgggcgcggggtcccttgcgggttcttgcggctgcggcacgccccagcggcctggcgcccatggcagttcggcagccgctcaccgatactcgcgggaggctaacgctccgggccccgtacccggagagcggcaactcgcgcactcaaagatggtccccatccctgctggagtatttacaatgggcacagatgatcctcagataaagcaggatggggaagcacctgcgaggagagttactattgatgccttttacatggatgcctatgaagtcagtaatactgaatttgagaagtttgtgaactcaactggctatttgacagaggttgcagctgctccctggtggttacctgtgaaaggcgctaactggagacacccagaagggcctgactctactattctgcacaggccggatcatccagttctccatgtgtcctggaatgatgcggttgcctactgcacttgggcagggaagcggctgcccacggaagctgagtgggaatacagctgtcgaggaggcctgcataatagacttttcccctggggcaacaaactgcagcccaaaggccagcattatgccaacatttggcagggcgagtttccggtgaccaacactggtgaggatggcttccaaggaactgcgcctgttgatgccttccctcccaatggttatggcttatacaacatagtggggaacgcatgggaatggacttcagactggtggactgttcatcattctgttgaagaaacgcttaacccaaaaggtcccccttctgggaaagaccgagtgaagaaaggtggatcctacatgtgccataggtcttattgttacaggtatcgctgtgctgctcggagccagaacacacctgatagctctgcttcgaatctgggattccgctgtgcagccgaccgcctgcccactatggactgacaaccaaggaaagtcttccccagtccaaggagcagtcgtgtctgacctacattgggcttttctcagaactttgaacgatcccatgcaaagaattcccaccctgaggtgggttacatacctgcccaatggccaaaggaaccgccttgtgagaccaaattgctgacctgggtcagtgcatgtgctttatggtgtggtgcatctttggagatcatcaccatattttacttttgagagtctttaaagaggaaggggagtggagggaaccctgagctaggcttcaggaggcccgcgtcctacgcaggctctgccacaggggttagaccccaggtccgacgcttgaccttcctgggcctcaagtgccctcccctatcaaatgaagggatggacagcatgacctctgggtgtctctccaactcaccagttctaaaaagggtatcagattctattgtgacttcatagtgagaatttattatagattattttttagctattttttccatgtgtgaaccttgagtgatactaatcatgtaaagtaagagttctcttatgtattattttcggaagaggggtgtggtgactcctttatattcgtactgcactttgtttttccaaggaaatcagtgtcttttacgttgttatgatgaatcccacatggggccggtgatggtatgctgaagttcagccgttgaacacataggaatgtctgtggggtgactctactgtgctttatcttttaacattaagtgcctttggttcagaggggcagtcataagctctgtttccccctctccccaaagccttcagcgaacgtgaaatgtgcgctaaacggggaaacctgtttaattctagatatagggaaaaaggaacgaggaccttgaatgagctatattcagggtatccggtattttgtaatagggaataggaaaccttgttggctgtggaatatccgatgctttgaatcatgcactgtgttgaataaacgtatctgctaaatcaggcaaaaaaaaaaaaaaaaaa

SEQ ID NO: 4296 - DNA, 2119 bp, Homo sapiens
  source 1..2119: mol_type = genomic DNA
cacgtgaccaaccgggtcacatggcccgcgggacaacatggctgcgcccgcactagggctggtgtgtggacgttgccctgagctgggtctcgtcctcttgctgctgctgctctcgctgctgtgtggagcggcagggagccaggaggccgggaccggtgcgggcgcggggtcccttgcgggttcttgcggctgcggcacgccccagcggcctggcgcccatggcagttcggcagccgctcaccgatactcgcgggaggctaacgctccgggccccgtacccggagagcggcaactcgcgcactcaaagatggtccccatccctgctggagtatttacaatgggcacagatgatcctcagataaagcaggatggggaagcacctgcgaggagagttactattgatgccttttacatggatgcctatgaagtcagtaatactgaatttgagaagtttgtgaactcaactggctatttgacagaggctgagaagtttggcgactcctttgtctttgaaggcatgttgagtgagcaagtgaagaccaatattcaacaggcagttgcagctgctccctggtggttacctgtgaaaggcgctaactggagacacccagaagggcctgactctactattctgcacaggccggatcatccagttctccatgtgtcctggaatgatgcggttgcctactgcacttgggcagggaagcggctgcccacggaagctgagtgggaatacagctgtcgaggaggcctgcataatagacttttcccctggggcaacaaactgcagcccaaaggccagcattatgccaacatttggcagggcgagtttccggtgaccaacactggtgaggatggcttccaaggaactgcgcctgttgatgccttccctcccaatggttatggcttatacaacatagtggggaacgcatgggaatggacttcagactggtggactgttcatcattctgttgaagaaacgcttaacccatcttattgttacaggtatcgctgtgctgctcggagccagaacacacctgatagctctgcttcgaatctgggattccgctgtgcagccgaccgcctgcccactatggactgacaaccaaggaaagtcttccccagtccaaggagcagtcgtgtctgacctacattgggcttttctcagaactttgaacgatcccatgcaaagaattcccaccctgaggtgggttacatacctgcccaatggccaaaggaaccgccttgtgagaccaaattgctgacctgggtcagtgcatgtgctttatggtgtggtgcatctttggagatcatcaccatattttacttttgagagtctttaaagaggaaggggagtggagggaaccctgagctaggcttcaggaggcccgcgtcctacgcaggctctgccacaggggttagaccccaggtccgacgcttgaccttcctgggcctcaagtgccctcccctatcaaatgaagggatggacagcatgacctctgggtgtctctccaactcaccagttctaaaaagggtatcagattctattgtgacttcatagtgagaatttattatagattattttttagctattttttccatgtgtgaaccttgagtgatactaatcatgtaaagtaagagttctcttatgtattattttcggaagaggggtgtggtgactcctttatattcgtactgcactttgtttttccaaggaaatcagtgtcttttacgttgttatgatgaatcccacatggggccggtgatggtatgctgaagttcagccgttgaacacataggaatgtctgtggggtgactctactgtgctttatcttttaacattaagtgcctttggttcagaggggcagtcataagctctgtttccccctctccccaaagccttcagcgaacgtgaaatgtgcgctaaacggggaaacctgtttaattctagatatagggaaaaaggaacgaggaccttgaatgagctatattcagggtatccggtattttgtaatagggaataggaaaccttgttggctgtggaatatccgatgctttgaatcatgcactgtgttgaataaacgtatctgctaaatcaggcaaaaaaaaaaaaaaaaaa

SEQ ID NO: 4297 - DNA, 2179 bp, Homo sapiens
  source 1..2179: mol_type = genomic DNA
cacgtgaccaaccgggtcacatggcccgcgggacaacatggctgcgcccgcactagggctggtgtgtggacgttgccctgagctgggtctcgtcctcttgctgctgctgctctcgctgctgtgtggagcggcagggagccaggaggccgggaccggtgcgggcgcggggtcccttgcgggttcttgcggctgcggcacgccccagcggcctggcgcccatggcagttcggcagccgctcaccgatactcgcgggaggctaacgctccgggccccgtacccggagagcggcaactcgcgcactcaaagatggtccccatccctgctggagtatttacaatgggcacagatgatcctcagataaagcaggatggggaagcacctgcgaggagagttactattgatgccttttacatggatgcctatgaagtcagtaatactgaatttgagaagtttgtgaactcaactggctatttgacagaggctgagaagtttggcgactcctttgtctttgaaggcatgttgagtgagcaagtgaagaccaatattcaacaggcagttgcagctgctccctggtggttacctgtgaaaggcgctaactggagacacccagaagggcctgactctactattctgcacaggccggatcatccagttctccatgtgtcctggaatgatgcggttgcctactgcacttgggcagggaagcggctgcccacggaagctgagtgggaatacagctgtcgaggaggcctgcataatagacttttcccctggggcaacaaactgcagcccaaaggccagcattatgccaacatttggcagggcgagtttccggtgaccaacactggtgaggatggcttccaaggaactgcgcctgttgatgccttccctcccaatggttatggcttatacaacatagtggggaacgcatgggaatggacttcagactggtggactgttcatcattctgttgaagaaacgcttaacccaaaaggtcccccttctgggaaagaccgagtgaagaaaggtggatcctacatgtgccataggtcttattgttacaggtatcgctgtgctgctcggagccagaacacacctgatagctctgcttcgaatctgggattccgctgtgcagccgaccgcctgcccactatggactgacaaccaaggaaagtcttccccagtccaaggagcagtcgtgtctgacctacattgggcttttctcagaactttgaacgatcccatgcaaagaattcccaccctgaggtgggttacatacctgcccaatggccaaaggaaccgccttgtgagaccaaattgctgacctgggtcagtgcatgtgctttatggtgtggtgcatctttggagatcatcaccatattttacttttgagagtctttaaagaggaaggggagtggagggaaccctgagctaggcttcaggaggcccgcgtcctacgcaggctctgccacaggggttagaccccaggtccgacgcttgaccttcctgggcctcaagtgccctcccctatcaaatgaagggatggacagcatgacctctgggtgtctctccaactcaccagttctaaaaagggtatcagattctattgtgacttcatagtgagaatttattatagattattttttagctattttttccatgtgtgaaccttgagtgatactaatcatgtaaagtaagagttctcttatgtattattttcggaagaggggtgtggtgactcctttatattcgtactgcactttgtttttccaaggaaatcagtgtcttttacgttgttatgatgaatcccacatggggccggtgatggtatgctgaagttcagccgttgaacacataggaatgtctgtggggtgactctactgtgctttatcttttaacattaagtgcctttggttcagaggggcagtcataagctctgtttccccctctccccaaagccttcagcgaacgtgaaatgtgcgctaaacggggaaacctgtttaattctagatatagggaaaaaggaacgaggaccttgaatgagctatattcagggtatccggtattttgtaatagggaataggaaaccttgttggctgtggaatatccgatgctttgaatcatgcactgtgttgaataaacgtatctgctaaatcaggcaaaaaaaaaaaaaaaaaa

SEQ ID NO: 4298 - DNA, 1468 bp, Homo sapiens
  source 1..1468: mol_type = genomic DNA
gagattcagtgttgagatagcaaaattctgcccctcgttccttggcagggccctatgatttatgcaggagcagaggcagcacgcaatcgagctgtcaagagagcgtcagcttattaggcaaatgctgcgtggtttttgaagagggtcgacactataaaatcccactccaggctctggagtggagaaactcagagaccaagtccattgagagactgaggggaaagagaggagagaaagaaaaagagagtgggaacagtaaagagaaaggaagacaacctccagagaaagcccccggagacgtctctctgcagagaggcggcagcacccggctcacctgcgaagcgcctgggaagcgagtgcccctaacatgcggctgccgctgcttgtgtccgcgggagtcctgctggtggctctcctgccctgcccgccatgcagggcgctcctgagccgcgggccggtcccgggagctcggcaggcgccgcagcaccctcagcccttggatttcttccagccgccgccgcagtccgagcagccccagcagccgcaggctcggccggtcctgctccgcatgggagaggagtacttcctccgcctggggaacctcaacaagagcccggccgctcccctttcgcccgcctcctcgctcctcgccggaggcagcggcagccgcccttcgccggaacaggcgaccgccaactttttccgcgtgttgctgcagcagctgctgctgcctcggcgctcgctcgacagccccgcggctctcgcggagcgcggcgctaggaatgccctcggcggccaccaggaggcaccggagagagaaaggcggtccgaggagcctcccatctccctggatctcaccttccacctcctccgggaagtcttggaaatggccagggccgagcagttagcacagcaagctcacagcaacaggaaactcatggagattattgggaaataaaacggtgcgtttggccaaaaagaatctgcatttagcacaaaaaaaatttaaaaaaatacagtattctgtaccatagcgctgctcttatgccatttgtttatttttatatagcttgaaacatagagggagagagggagagagcctataccccttacttagcatgcacaaagtgtattcacgtgcagcagcaacacaatgttattcgttttgtctacgtttagtttccgtttccaggtgtttatagtggtgttttaaagagaatgtagacctgtgagaaaacgttttgtttgaaaaagcagacagaagtcactcaattgtttttgttgtggtctgagccaaagagaatgccattctcttgggtgggtaagactaaatctgtaagctctttgaaacaactttctcttgtaaacgtttcagtaataaaacatctttccagtccttggtcagtttggttgtgtaagagaatgttgaatacttatatttttaataaaagttgcaaaggtaatcatg

SEQ ID NO: 4299 - DNA, 2482 bp, Homo sapiens
  source 1..2482: mol_type = genomic DNA
agctgtcagagatcagaggaagaggaaggggcggagctgctttgcggccggccgcggagcagtcagccgactacagagaagggtaatcgggtgtccccggcgccgcccggggccctgagggctggctagggtccaggccgggggggacgggacagacgaaccagccccgtgtaggaagcgcgacaatgccccgctacggagcgtcactccgccagagctgccccaggtccggccgggagcagggacaagacgggaccgccggagcccccggactcctttggatgggcctggtgctggcgctggcgctggcgctggcgctggcgctggctctgtctgactctcgggttctctgggctccggcagaggctcaccctctttctccccaaggccatcctgccaggttacatcgcatagtgccccggctccgagatgtctttgggtgggggaacctcacctgcccaatctgcaaaggtctattcaccgccatcaacctcgggctgaagaaggaacccaatgtggctcgcgtgggctccgtggccatcaagctgtgcaatctgctgaagatagcaccacctgccgtgtgccaatccattgtccacctctttgaggatgacatggtggaggtgtggagacgctcagtgctgagcccatctgaggcctgtggcctgctcctgggctccacctgtgggcactgggacattttctcatcttggaacatctctttgcctactgtgccgaagccgccccccaaaccccctagccccccagccccaggtgcccctgtcagccgcatcctcttcctcactgacctgcactgggatcatgactacctggagggcacggaccctgactgtgcagacccactgtgctgccgccggggttctggcctgccgcccgcatcccggccaggtgccggatactggggcgaatacagcaagtgtgacctgcccctgaggaccctggagagcctgttgagtgggctgggcccagccggcccttttgatatggtgtactggacaggagacatccccgcacatgatgtctggcaccagactcgtcaggaccaactgcgggccctgaccaccgtcacagcacttgtgaggaagttcctggggccagtgccagtgtaccctgctgtgggtaaccatgaaagcacacctgtcaatagcttccctccccccttcattgagggcaaccactcctcccgctggctctatgaagcgatggccaaggcttgggagccctggctgcctgccgaagccctgcgcaccctcagaattggggggttctatgctctttccccataccccggtctccgcctcatctctctcaatatgaatttttgttcccgtgagaacttctggctcttgatcaactccacggatcccgcaggacagctccagtggctggtgggggagcttcaggctgctgaggatcgaggagacaaagtgcatataattggccacattcccccagggcactgtctgaagagctggagctggaattattaccgaattgtagccaggtatgagaacaccctggctgctcagttctttggccacactcatgtggatgaatttgaggtcttctatgatgaagagactctgagccggccgctggctgtagccttcctggcacccagtgcaactacctacatcggccttaatcctggttaccgtgtgtaccaaatagatggaaactactccgggagctctcacgtggtcctggaccatgagacctacatcctgaatctgacccaggcaaacataccgggagccataccgcactggcagcttctctacagggctcgagaaacctatgggctgcccaacacactgcctaccgcctggcacaacctggtatatcgcatgcggggcgacatgcaacttttccagaccttctggtttctctaccataagggccacccaccctcggagccctgtggcacgccctgccgtctggctactctttgtgcccagctctctgcccgtgctgacagccctgctctgtgccgccacctgatgccagatgggagcctcccagaggcccagagcctgtggccaaggccactgttttgctagggccccagggcccacatttgggaaagttcttgatgtaggaaagggtgaaaaagcccaaatgctgctgtggttcaaccaggcaagatcatccggtgaaagaaccagtccctgggccccaaggatgccggggaaacaggaccttctcctttcctggagctggtttagctggatatgggagggggtttggctgcctgtgcccaggagctagactgccttgaggctgctgtcctttcacagccatggagtagaggcctaagttgacactgccctgggcagacaagacaggagctgtcgccccaggcctgtgctgcccagccaggaaccctgtactgctgctgcgacctgatgctgccagtctgttaaaataaagataagagacttggactccagaaaaaaaaaaa

SEQ ID NO: 4300 - DNA, 2479 bp, Homo sapiens
  source 1..2479: mol_type = genomic DNA
agctgtcagagatcagaggaagaggaaggggcggagctgctttgcggccggccgcggagcagtcagccgactacagagaagggtaatcgggtgtccccggcgccgcccggggccctgagggctggctagggtccaggccgggggggacgggacagacgaaccagccccgtgtaggaagcgcgacaatgccccgctacggagcgtcactccgccagagctgccccaggtccggccgggagcagggacaagacgggaccgccggagcccccggactcctttggatgggcctggtgctggcgctggcgctggcgctggcgctggcgctggctctgtctgactctcgggttctctgggctccggcagaggctcaccctctttctccccaaggccatcctgccaggttacatcgcatagtgccccggctccgagatgtctttgggtgggggaacctcacctgcccaatctgcaaaggtctattcaccgccatcaacctcgggctgaaggaacccaatgtggctcgcgtgggctccgtggccatcaagctgtgcaatctgctgaagatagcaccacctgccgtgtgccaatccattgtccacctctttgaggatgacatggtggaggtgtggagacgctcagtgctgagcccatctgaggcctgtggcctgctcctgggctccacctgtgggcactgggacattttctcatcttggaacatctctttgcctactgtgccgaagccgccccccaaaccccctagccccccagccccaggtgcccctgtcagccgcatcctcttcctcactgacctgcactgggatcatgactacctggagggcacggaccctgactgtgcagacccactgtgctgccgccggggttctggcctgccgcccgcatcccggccaggtgccggatactggggcgaatacagcaagtgtgacctgcccctgaggaccctggagagcctgttgagtgggctgggcccagccggcccttttgatatggtgtactggacaggagacatccccgcacatgatgtctggcaccagactcgtcaggaccaactgcgggccctgaccaccgtcacagcacttgtgaggaagttcctggggccagtgccagtgtaccctgctgtgggtaaccatgaaagcacacctgtcaatagcttccctccccccttcattgagggcaaccactcctcccgctggctctatgaagcgatggccaaggcttgggagccctggctgcctgccgaagccctgcgcaccctcagaattggggggttctatgctctttccccataccccggtctccgcctcatctctctcaatatgaatttttgttcccgtgagaacttctggctcttgatcaactccacggatcccgcaggacagctccagtggctggtgggggagcttcaggctgctgaggatcgaggagacaaagtgcatataattggccacattcccccagggcactgtctgaagagctggagctggaattattaccgaattgtagccaggtatgagaacaccctggctgctcagttctttggccacactcatgtggatgaatttgaggtcttctatgatgaagagactctgagccggccgctggctgtagccttcctggcacccagtgcaactacctacatcggccttaatcctggttaccgtgtgtaccaaatagatggaaactactccgggagctctcacgtggtcctggaccatgagacctacatcctgaatctgacccaggcaaacataccgggagccataccgcactggcagcttctctacagggctcgagaaacctatgggctgcccaacacactgcctaccgcctggcacaacctggtatatcgcatgcggggcgacatgcaacttttccagaccttctggtttctctaccataagggccacccaccctcggagccctgtggcacgccctgccgtctggctactctttgtgcccagctctctgcccgtgctgacagccctgctctgtgccgccacctgatgccagatgggagcctcccagaggcccagagcctgtggccaaggccactgttttgctagggccccagggcccacatttgggaaagttcttgatgtaggaaagggtgaaaaagcccaaatgctgctgtggttcaaccaggcaagatcatccggtgaaagaaccagtccctgggccccaaggatgccggggaaacaggaccttctcctttcctggagctggtttagctggatatgggagggggtttggctgcctgtgcccaggagctagactgccttgaggctgctgtcctttcacagccatggagtagaggcctaagttgacactgccctgggcagacaagacaggagctgtcgccccaggcctgtgctgcccagccaggaaccctgtactgctgctgcgacctgatgctgccagtctgttaaaataaagataagagacttggactccagaaaaaaaaaaa

SEQ ID NO: 4301 - protein, 635 aa, Homo sapiens
MSGAGRALAALLLAASVLSAALLAPGGSSGRDAQAAPPRDLDKKRHAELKMDQALLLIHNELLWTNLTVYWKSECCYHCLFQVLVNVPQSPKAGKPSAAAASVSTQHGSILQLNDTLEEKEVCRLEYRFGEFGNYSLLVKNIHNGVSEIACDLAVNEDPVDSNLPVSIAFLIGLAVIIVISFLRLLLSLDDFNNWISKAISSRETDRLINSELGSPSRTDPLDGDVQPATWRLSALPPRLRSVDTFRGIALILMVFVNYGGGKYWYFKHASWNGLTVADLVFPWFVFIMGSSIFLSMTSILQRGCSKFRLLGKIAWRSFLLICIGIIIVNPNYCLGPLSWDKVRIPGVLQRLGVTYFVVAVLELLFAKPVPEHCASERSCLSLRDITSSWPQWLLILVLEGLWLGLTFLLPVPGCPTGYLGPGGIGDFGKYPNCTGGAAGYIDRLLLGDDHLYQHPSSAVLYHTEVAYDPEGILGTINSIVMAFLGVQAGKILLYYKARTKDILIRFTAWCCILGLISVALTKVSENEGFIPVNKNLWSLSYVTTLSSFAFFILLVLYPVVDVKGLWTGTPFFYPGMNSILVYVGHEVFENYFPFQWKLKDNQSHKEHLTQNIVATALWVLIAYILYRKKIFWKI

SEQ ID NO: 4302 - protein, 463 aa, Homo sapiens
MGRKKIQITRIMDERNRQVTFTKRKFGLMKKAYELSVLCDCEIALIIFNSTNKLFQYASTDMDKVLLKYTEYNEPHESRTNSDIVEALNKKENKGCESPDPDSSYALTPRTEEKYKKINEEFDNMIKSHKIPAVPPPNFEMPVSIPVSSHNSLVYSNPVSSLGNPNLLPLAHPSLQRNSMSPGVTHRPPSAGNTGGLMGGDLTSGAGTSAGNGYGNPRNSPGLLVSPGNLNKNMQAKSPPPMNLGMNNRKPDLRVLIPPGSKNTMPSVNQRINNSQSAQSLATPVVSVATPTLPGQGMGGYPSAISTTYGTEYSLSSADLSSLSGFNTASALHLGSVTGWQQQHLHNMPPSALSQLGACTSTHLSQSSNLSLPSTQSLNIKSEPVSPPRDRTTTPSRYPQHTRHEAGRSPVDSLSSCSSSYDGSDREDHRNEFHSPIGLTRPSPDERESPSVKRMRLSEGWAT

SEQ ID NO: 4303 - protein, 473 aa, Homo sapiens
MGRKKIQITRIMDERNRQVTFTKRKFGLMKKAYELSVLCDCEIALIIFNSTNKLFQYASTDMDKVLLKYTEYNEPHESRTNSDIVETLRKKGLNGCDSPDPDADDSVGHSPESEDKYRKINEDIDLMISRQRLCAVPPPNFEMPVSIPVSSHNSLVYSNPVSSLGNPNLLPLAHPSLQRNSMSPGVTHRPPSAGNTGGLMGGDLTSGAGTSAGNGYGNPRNSPGLLVSPGNLNKNMQAKSPPPMNLGMNNRKPDLRVLIPPGSKNTMPSVSEDVDLLLNQRINNSQSAQSLATPVVSVATPTLPGQGMGGYPSAISTTYGTEYSLSSADLSSLSGFNTASALHLGSVTGWQQQHLHNMPPSALSQLGACTSTHLSQSSNLSLPSTQSLNIKSEPVSPPRDRTTTPSRYPQHTRHEAGRSPVDSLSSCSSSYDGSDREDHRNEFHSPIGLTRPSPDERESPSVKRMRLSEGWAT

SEQ ID NO: 4304 - protein, 197 aa, Homo sapiens
MQRWKAAALASVLCSSVLSIWMCREGLLLSHRLGPALVPLHRLPRTLDARIARLAQYRALLQGAPDAMELRELTPWAGRPPGPRRRAGPRRRRARARLGARPCGLRELEVRVSELGLGYASDETVLFRYCAGACEAAARVYDLGLRRLRQRRRLRRERVRAQPCCRPTAYEDEVSFLDAHSRYHTVHELSARECACV

SEQ ID NO: 4305 - protein, 170 aa, Homo sapiens
MPVMRLFPCFLQLLAGLALPAVPPQQWALSAGNGSSEVEVVPFQEVWGRSYCRALERLVDVVSEYPSEVEHMFSPSCVSLLRCTGCCGDENLHCVPVETANVTMQLLKIRSGDRPSYVELTFSQHVRCECRPLREKMKPERRRPKGRGKRRREKQRPTDCHLCGDAVPRR

SEQ ID NO: 4306 - protein, 533 aa, Homo sapiens
MSIQVEHPAGGYKKLFETVEELSSPLTAHVTGRIPLWLTGSLLRCGPGLFEVGSEPFYHLFDGQALLHKFDFKEGHVTYHRRFIRTDAYVRAMTEKRIVITEFGTCAFPDPCKNIFSRFFSYFRGVEVTDNALVNVYPVGEDYYACTETNFITKINPETLETIKQVDLCNYVSVNGATAHPHIENDGTVYNIGNCFGKNFSIAYNIVKIPPLQADKEDPISKSEIVVQFPCSDRFKPSYVHSFGLTPNYIVFVETPVKINLFKFLSSWSLWGANYMDCFESNETMGVWLHIADKKRKKYLNNKYRTSPFNLFHHINTYEDNGFLIVDLCCWKGFEFVYNYLYLANLRENWEEVKKNARKAPQPEVRRYVLPLNIDKADTGKNLVTLPNTTATAILCSDETIWLEPEVLFSGPRQAFEFPQINYQKYCGKPYTYAYGLGLNHFVPDRLCKLNVKTKETWVWQEPDSYPSEPIFVSHPDALEEDDGVVLSVVVSPGAGQKPAYLLILNAKDLSEVARAEVEINIPVTFHGLFKKS

SEQ ID NO: 4307 - protein, 211 aa, Homo sapiens
MKLWDVVAVCLVLLHTASAFPLPAGKRPPEAPAEDRSLGRRRAPFALSSDSNMPEDYPDQFDDVMDFIQATIKRLKRSPDKQMAVLPRRERNRQAAAANPENSRGKGRRGQRGKNRGCVLTAIHLNVTDLGLGYETKEELIFRYCSGSCDAAETTYDKILKNLSRNRRLVSDKVGQACCRPIAFDDDLSFLDDNLVYHILRKHSAKRCGCI

SEQ ID NO: 4308 - protein, 185 aa, Homo sapiens
MKLWDVVAVCLVLLHTASAFPLPAANMPEDYPDQFDDVMDFIQATIKRLKRSPDKQMAVLPRRERNRQAAAANPENSRGKGRRGQRGKNRGCVLTAIHLNVTDLGLGYETKEELIFRYCSGSCDAAETTYDKILKNLSRNRRLVSDKVGQACCRPIAFDDDLSFLDDNLVYHILRKHSAKRCGCI

SEQ ID NO: 4309 - protein, 809 aa, Homo sapiens
MFKSLTKVNKVKPIGENNENEQSSRRNEEGSHPSNQSQQTTAQEENKGEEKSLKTKSTPVTSEEPHTNIQDKLSKKNSSGDLTTNPDPQNAAEPTGTVPEQKEMDPGKEGPNSPQNKPPAAPVINEYADAQLHNLVKRMRQRTALYKKKLVEGDLSSPEASPQTAKPTAVPPVKESDDKPTEHYYRLLWFKVKKMPLTEYLKRIKLPNSIDSYTDRLYLLWLLLVTLAYNWNCCFIPLRLVFPYQTADNIHYWLIADIICDIIYLYDMLFIQPRLQFVRGGDIIVDSNELRKHYRTSTKFQLDVASIIPFDICYLFFGFNPMFRANRMLKYTSFFEFNHHLESIMDKAYIYRVIRTTGYLLFILHINACVYYWASNYEGIGTTRWVYDGEGNEYLRCYYWAVRTLITIGGLPEPQTLFEIVFQLLNFFSGVFVFSSLIGQMRDVIGAATANQNYFRACMDDTIAYMNNYSIPKLVQKRVRTWYEYTWDSQRMLDESDLLKTLPTTVQLALAIDVNFSIISKVDLFKGCDTQMIYDMLLRLKSVLYLPGDFVCKKGEIGKEMYIIKHGEVQVLGGPDGTKVLVTLKAGSVFGEISLLAAGGGNRRTANVVAHGFANLLTLDKKTLQEILVHYPDSERILMKKARVLLKQKAKTAEATPPRKDLALLFPPKEETPKLFKTLLGGTGKASLARLLKLKREQAAQKKENSEGGEEEGKENEDKQKENEDKQKENEDKGKENEDKDKGREPEEKPLDRPECTASPIAVEEEPHSVRRTVLPRGTSRQSLIISMAPSAEGGEEVLTIEVKEKAKQ

SEQ ID NO: 4310 - protein, 247 aa, Homo sapiens
MTILFLTMVISYFGCMKAAPMKEANIRGQGGLAYPGVRTHGTLESVNGPKAGSRGLTSLADTFEHVIEELLDEDQKVRPNEENNKDADLYTSRVMLSSQVPLEPPLLFLLEEYKNYLDAANMSMRVRRHSDPARRGELSVCDSISEWVTAADKKTAVDMSGGTVTVLEKVPVSKGQLKQYFYETKCNPMGYTKEGCRGIDKRHWNSQCRTTQSYVRALTMDSKKRIGWRFIRIDTSCVCTLTIKRGR

SEQ ID NO: 4311 - protein, 247 aa, Homo sapiens; identical to SEQ ID NO: 4310

SEQ ID NO: 4312 - protein, 247 aa, Homo sapiens; identical to SEQ ID NO: 4310

SEQ ID NO: 4313 - protein, 247 aa, Homo sapiens; identical to SEQ ID NO: 4310

SEQ ID NO: 4314 - protein, 247 aa, Homo sapiens; identical to SEQ ID NO: 4310

SEQ ID NO: 4315 - protein, 262 aa, Homo sapiens
MQSREEEWFHQVRRVMTILFLTMVISYFGCMKAAPMKEANIRGQGGLAYPGVRTHGTLESVNGPKAGSRGLTSLADTFEHVIEELLDEDQKVRPNEENNKDADLYTSRVMLSSQVPLEPPLLFLLEEYKNYLDAANMSMRVRRHSDPARRGELSVCDSISEWVTAADKKTAVDMSGGTVTVLEKVPVSKGQLKQYFYETKCNPMGYTKEGCRGIDKRHWNSQCRTTQSYVRALTMDSKKRIGWRFIRIDTSCVCTLTIKRGR

SEQ ID NO: 4316 - protein, 247 aa, Homo sapiens; identical to SEQ ID NO: 4310

SEQ ID NO: 4317 - protein, 255 aa, Homo sapiens
MFHQVRRVMTILFLTMVISYFGCMKAAPMKEANIRGQGGLAYPGVRTHGTLESVNGPKAGSRGLTSLADTFEHVIEELLDEDQKVRPNEENNKDADLYTSRVMLSSQVPLEPPLLFLLEEYKNYLDAANMSMRVRRHSDPARRGELSVCDSISEWVTAADKKTAVDMSGGTVTVLEKVPVSKGQLKQYFYETKCNPMGYTKEGCRGIDKRHWNSQCRTTQSYVRALTMDSKKRIGWRFIRIDTSCVCTLTIKRGR

SEQ ID NO: 4318 - protein, 247 aa, Homo sapiens; identical to SEQ ID NO: 4310

SEQ ID NO: 4319 - protein, 247 aa, Homo sapiens; identical to SEQ ID NO: 4310

SEQ ID NO: 4320 - protein, 276 aa, Homo sapiens
MLCAISLCARVRKLRSAGRCGKFHQVRRVMTILFLTMVISYFGCMKAAPMKEANIRGQGGLAYPGVRTHGTLESVNGPKAGSRGLTSLADTFEHVIEELLDEDQKVRPNEENNKDADLYTSRVMLSSQVPLEPPLLFLLEEYKNYLDAANMSMRVRRHSDPARRGELSVCDSISEWVTAADKKTAVDMSGGTVTVLEKVPVSKGQLKQYFYETKCNPMGYTKEGCRGIDKRHWNSQCRTTQSYVRALTMDSKKRIGWRFIRIDTSCVCTLTIKRGR

SEQ ID NO: 4321 - protein, 329 aa, Homo sapiens
MCGATSFLHECTRLILVTTQNAEFLQKGLQVHTCFGVYPHASVWHDCASQKKGCAVYLHVSVEFNKLIPENGFIKFHQVRRVMTILFLTMVISYFGCMKAAPMKEANIRGQGGLAYPGVRTHGTLESVNGPKAGSRGLTSLADTFEHVIEELLDEDQKVRPNEENNKDADLYTSRVMLSSQVPLEPPLLFLLEEYKNYLDAANMSMRVRRHSDPARRGELSVCDSISEWVTAADKKTAVDMSGGTVTVLEKVPVSKGQLKQYFYETKCNPMGYTKEGCRGIDKRHWNSQCRTTQSYVRALTMDSKKRIGWRFIRIDTSCVCTLTIKRGR

SEQ ID NO: 4322 - protein, 247 aa, Homo sapiens; identical to SEQ ID NO: 4310

SEQ ID NO: 4323 - protein, 247 aa, Homo sapiens; identical to SEQ ID NO: 4310

SEQ ID NO: 4324 - protein, 247 aa, Homo sapiens; identical to SEQ ID NO: 4310

SEQ ID NO: 4325 - protein, 247 aa, Homo sapiens; identical to SEQ ID NO: 4310

SEQ ID NO: 4326 - protein, 247 aa, Homo sapiens; identical to SEQ ID NO: 4310

SEQ ID NO: 4327 - protein, 639 aa, Homo sapiens
MLPGLALLLLAAWTARALEVYPELQITNVVEANQPVTIQNWCKRGRKQCKTHPHFVIPYRCLVGEFVSDALLVPDKCKFLHQERMDVCETHLHWHTVAKETCSEKSTNLHDYGMLLPCGIDKFRGVEFVCCPLAEESDNVDSADAEEDDSDVWWGGADTDYADGSEDKVVEVAEEEEVAEVEEEEADDDEDDEDGDEVEEEAEEPYEEATERTTSIATTTTTTTESVEEVVRVPTTAASTPDAVDKYLETPGDENEHAHFQKAKERLEAKHRERMSQVMREWEEAERQAKNLPKADKKAVIQHFQEKVESLEQEAANERQQLVETHMARVEAMLNDRRRLALENYITALQAVPPRPRHVFNMLKKYVRAEQKDRQHTLKHFEHVRMVDPKKAAQIRSQVMTHLRVIYERMNQSLSLLYNVPAVAEEIQDEVDELLQKEQNYSDDVLANMISEPRISYGNDALMPSLTETKTTVELLPVNGEFSLDDLQPWHSFGADSVPANTENEVEPVDARPAADRGLTTRPGSGLTNIKTEEISEVKMDAEFRHDSGYEVHHQKLVFFAEDVGSNKGAIIGLMVGGVVIATVIVITLVMLKKKQYTSIHHGVVEVDAAVTPEERHLSKMQQNGYENPTYKFFEQMQN

SEQ ID NO: 4328 - protein, 695 aa, Homo sapiens
MLPGLALLLLAAWTARALEVPTDGNAGLLAEPQIAMFCGRLNMHMNVQNGKWDSDPSGTKTCIDTKEGILQYCQEVYPELQITNVVEANQPVTIQNWCKRGRKQCKTHPHFVIPYRCLVGEFVSDALLVPDKCKFLHQERMDVCETHLHWHTVAKETCSEKSTNLHDYGMLLPCGIDKFRGVEFVCCPLAEESDNVDSADAEEDDSDVWWGGADTDYADGSEDKVVEVAEEEEVAEVEEEEADDDEDDEDGDEVEEEAEEPYEEATERTTSIATTTTTTTESVEEVVRVPTTAASTPDAVDKYLETPGDENEHAHFQKAKERLEAKHRERMSQVMREWEEAERQAKNLPKADKKAVIQHFQEKVESLEQEAANERQQLVETHMARVEAMLNDRRRLALENYITALQAVPPRPRHVFNMLKKYVRAEQKDRQHTLKHFEHVRMVDPKKAAQIRSQVMTHLRVIYERMNQSLSLLYNVPAVAEEIQDEVDELLQKEQNYSDDVLANMISEPRISYGNDALMPSLTETKTTVELLPVNGEFSLDDLQPWHSFGADSVPANTENEVEPVDARPAADRGLTTRPGSGLTNIKTEEISEVKMDAEFRHDSGYEVHHQKLVFFAEDVGSNKGAIIGLMVGGVVIATVIVITLVMLKKKQYTSIHHGVVEVDAAVTPEERHLSKMQQNGYENPTYKFFEQMQN

SEQ ID NO: 4329 - protein, 751 aa, Homo sapiens
MLPGLALLLLAAWTARALEVPTDGNAGLLAEPQIAMFCGRLNMHMNVQNGKWDSDPSGTKTCIDTKEGILQYCQEVYPELQITNVVEANQPVTIQNWCKRGRKQCKTHPHFVIPYRCLVGEFVSDALLVPDKCKFLHQERMDVCETHLHWHTVAKETCSEKSTNLHDYGMLLPCGIDKFRGVEFVCCPLAEESDNVDSADAEEDDSDVWWGGADTDYADGSEDKVVEVAEEEEVAEVEEEEADDDEDDEDGDEVEEEAEEPYEEATERTTSIATTTTTTTESVEEVVREVCSEQAETGPCRAMISRWYFDVTEGKCAPFFYGGCGGNRNNFDTEEYCMAVCGSAIPTTAASTPDAVDKYLETPGDENEHAHFQKAKERLEAKHRERMSQVMREWEEAERQAKNLPKADKKAVIQHFQEKVESLEQEAANERQQLVETHMARVEAMLNDRRRLALENYITALQAVPPRPRHVFNMLKKYVRAEQKDRQHTLKHFEHVRMVDPKKAAQIRSQVMTHLRVIYERMNQSLSLLYNVPAVAEEIQDEVDELLQKEQNYSDDVLANMISEPRISYGNDALMPSLTETKTTVELLPVNGEFSLDDLQPWHSFGADSVPANTENEVEPVDARPAADRGLTTRPGSGLTNIKTEEISEVKMDAEFRHDSGYEVHHQKLVFFAEDVGSNKGAIIGLMVGGVVIATVIVITLVMLKKKQYTSIHHGVVEVDAAVTPEERHLSKMQQNGYENPTYKFFEQMQN

SEQ ID NO: 4330 - protein, 714 aa, Homo sapiens
MLPGLALLLLAAWTARALEVYPELQITNVVEANQPVTIQNWCKRGRKQCKTHPHFVIPYRCLVGEFVSDALLVPDKCKFLHQERMDVCETHLHWHTVAKETCSEKSTNLHDYGMLLPCGIDKFRGVEFVCCPLAEESDNVDSADAEEDDSDVWWGGADTDYADGSEDKVVEVAEEEEVAEVEEEEADDDEDDEDGDEVEEEAEEPYEEATERTTSIATTTTTTTESVEEVVREVCSEQAETGPCRAMISRWYFDVTEGKCAPFFYGGCGGNRNNFDTEEYCMAVCGSAMSQSLLKTTQEPLARDPVKLPTTAASTPDAVDKYLETPGDENEHAHFQKAKERLEAKHRERMSQVMREWEEAERQAKNLPKADKKAVIQHFQEKVESLEQEAANERQQLVETHMARVEAMLNDRRRLALENYITALQAVPPRPRHVFNMLKKYVRAEQKDRQHTLKHFEHVRMVDPKKAAQIRSQVMTHLRVIYERMNQSLSLLYNVPAVAEEIQDEVDELLQKEQNYSDDVLANMISEPRISYGNDALMPSLTETKTTVELLPVNGEFSLDDLQPWHSFGADSVPANTENEVEPVDARPAADRGLTTRPGSGLTNIKTEEISEVKMDAEFRHDSGYEVHHQKLVFFAEDVGSNKGAIIGLMVGGVVIATVIVITLVMLKKKQYTSIHHGVVEVDAAVTPEERHLSKMQQNGYENPTYKFFEQMQN

SEQ ID NO: 4331 - protein, 746 aa, Homo sapiens
MDQLEDLLVLFINYVPTDGNAGLLAEPQIAMFCGRLNMHMNVQNGKWDSDPSGTKTCIDTKEGILQYCQEVYPELQITNVVEANQPVTIQNWCKRGRKQCKTHPHFVIPYRCLVGEFVSDALLVPDKCKFLHQERMDVCETHLHWHTVAKETCSEKSTNLHDYGMLLPCGIDKFRGVEFVCCPLAEESDNVDSADAEEDDSDVWWGGADTDYADGSEDKVVEVAEEEEVAEVEEEEADDDEDDEDGDEVEEEAEEPYEEATERTTSIATTTTTTTESVEEVVREVCSEQAETGPCRAMISRWYFDVTEGKCAPFFYGGCGGNRNNFDTEEYCMAVCGSAIPTTAASTPDAVDKYLETPGDENEHAHFQKAKERLEAKHRERMSQVMREWEEAERQAKNLPKADKKAVIQHFQEKVESLEQEAANERQQLVETHMARVEAMLNDRRRLALENYITALQAVPPRPRHVFNMLKKYVRAEQKDRQHTLKHFEHVRMVDPKKAAQIRSQVMTHLRVIYERMNQSLSLLYNVPAVAEEIQDEVDELLQKEQNYSDDVLANMISEPRISYGNDALMPSLTETKTTVELLPVNGEFSLDDLQPWHSFGADSVPANTENEVEPVDARPAADRGLTTRPGSGLTNIKTEEISEVKMDAEFRHDSGYEVHHQKLVFFAEDVGSNKGAIIGLMVGGVVIATVIVITLVMLKKKQYTSIHHGVVEVDAAVTPEERHLSKMQQNGYENPTYKFFEQMQN

SEQ ID NO: 4332 - protein, 770 aa, Homo sapiens
MLPGLALLLLAAWTARALEVPTDGNAGLLAEPQIAMFCGRLNMHMNVQNGKWDSDPSGTKTCIDTKEGILQYCQEVYPELQITNVVEANQPVTIQNWCKRGRKQCKTHPHFVIPYRCLVGEFVSDALLVPDKCKFLHQERMDVCETHLHWHTVAKETCSEKSTNLHDYGMLLPCGIDKFRGVEFVCCPLAEESDNVDSADAEEDDSDVWWGGADTDYADGSEDKVVEVAEEEEVAEVEEEEADDDEDDEDGDEVEEEAEEPYEEATERTTSIATTTTTTTESVEEVVREVCSEQAETGPCRAMISRWYFDVTEGKCAPFFYGGCGGNRNNFDTEEYCMAVCGSAMSQSLLKTTQEPLARDPVKLPTTAASTPDAVDKYLETPGDENEHAHFQKAKERLEAKHRERMSQVMREWEEAERQAKNLPKADKKAVIQHFQEKVESLEQEAANERQQLVETHMARVEAMLNDRRRLALENYITALQAVPPRPRHVFNMLKKYVRAEQKDRQHTLKHFEHVRMVDPKKAAQIRSQVMTHLRVIYERMNQSLSLLYNVPAVAEEIQDEVDELLQKEQNYSDDVLANMISEPRISYGNDALMPSLTETKTTVELLPVNGEFSLDDLQPWHSFGADSVPANTENEVEPVDARPAADRGLTTRPGSGLTNIKTEEISEVKMDAEFRHDSGYEVHHQKLVFFAEDVGSNKGAIIGLMVGGVVIATVIVITLVMLKKKQYTSIHHGVVEVDAAVTPEERHLSKMQQNGYENPTYKFFEQMQN

SEQ ID NO: 4333 - protein, 660 aa, Homo sapiens
MFCGRLNMHMNVQNGKWDSDPSGTKTCIDTKEGILQYCQEVYPELQITNVVEANQPVTIQNWCKRGRKQCKTHPHFVIPYRCLVGEFVSDALLVPDKCKFLHQERMDVCETHLHWHTVAKETCSEKSTNLHDYGMLLPCGIDKFRGVEFVCCPLAEESDNVDSADAEEDDSDVWWGGADTDYADGSEDKVVEVAEEEEVAEVEEEEADDDEDDEDGDEVEEEAEEPYEEATERTTSIATTTTTTTESVEEVVRVPTTAASTPDAVDKYLETPGDENEHAHFQKAKERLEAKHRERMSQVMREWEEAERQAKNLPKADKKAVIQHFQEKVESLEQEAANERQQLVETHMARVEAMLNDRRRLALENYITALQAVPPRPRHVFNMLKKYVRAEQKDRQHTLKHFEHVRMVDPKKAAQIRSQVMTHLRVIYERMNQSLSLLYNVPAVAEEIQDEVDELLQKEQNYSDDVLANMISEPRISYGNDALMPSLTETKTTVELLPVNGEFSLDDLQPWHSFGADSVPANTENEVEPVDARPAADRGLTTRPGSGLTNIKTEEISEVKMDAEFRHDSGYEVHHQKLVFFAEDVGSNKGAIIGLMVGGVVIATVIVITLVMLKKKQYTSIHHGVVEVDAAVTPEERHLSKMQQNGYENPTYKFFEQMQN

SEQ ID NO: 4334 - protein, 313 aa, Homo sapiens
MTSCHIAEEHIQKVAIFGGTHGNELTGVFLVKHWLENGAEIQRTGLEVKPFITNPRAVKKCTRYIDCDLNRIFDLENLGKKMSEDLPYEVRRAQEINHLFGPKDSEDSYDIIFDLHNTTSNMGCTLILEDSRNNFLIQMFHYIKTSLAPLPCYVYLIEHPSLKYATTRSIAKYPVGIEVGPQPQGVLRADILDQMRKMIKHALDFIHHFNEGKEFPPCAIEVYKIIEKVDYPRDENGEIAAIIHPNLQDQDWKPLHPGDPMFLTLDGKTIPLGGDCTVYPVFVNEAAYYEKKEAFAKTTKLTLNAKSIRCCLH

SEQ ID NO: 4335 - protein, 313 aa, Homo sapiens; identical to SEQ ID NO: 4334

SEQ ID NO: 4336 - protein, 382 aa, Homo sapiens
MGPTSVPLVKAHRSSVSDYVNYDIIVRHYNYTGKLNISADKENSIKLTSVVFILICCFIILENIFVLLTIWKTKKFHRPMYYFIGNLALSDLLAGVAYTANLLLSGATTYKLTPAQWFLREGSMFVALSASVFSLLAIAIERYITMLKMKLHNGSNNFRLFLLISACWVISLILGGLPIMGWNCISALSSCSTVLPLYHKHYILFCTTVFTLLLLSIVILYCRIYSLVRTRSRRLTFRKNISKASRSSEKSLALLKTVIIVLSVFIACWAPLFILLLLDVGCKVKTCDILFRAEYFLVLAVLNSGTNPIIYTLTNKEMRRAFIRIMSCCKCPSGDSAGKFKRPIIAGMEFSRSKSDNSSHPQKDEGDNPETIMSSGNVNSSS

SEQ ID NO: 4337 - protein, 460 aa, Homo sapiens
MPLRRRPDTTRLYDFNSYWRVHAGNFSTIPQYFKENGYVTMSVGKVFHPGISSNHTDDSPYSWSFPPYHPSSEKYENTKTCRGPDGELHANLLCPVDVLDVPEGTLPDKQSTEQAIQLLEKMKTSASPFFLAVGYHKPHIPFRYPKEFQKLYPLENITLAPDPEVPDGLPPVAYNPWMDIRQREDVQALNISVPYGPIPVDFQRKIRQSYFASVSYLDTQVGRLLSALDDLQLANSTIIAFTSDHGWALGEHGEWAKYSNFDVATHVPLIFYVPGRTASLPEAGEKLFPYLDPFDSASQLMEPGRQSMDLVELVSLFPTLAGLAGLQVPPRCPVPSFHVELCREGKNLLKHFRFRDLEEDPYLPGNPRELIAYSQYPRPSDIPQWNSDKPSLKDIKIMGYSIRTIDYRYTVWVGFNPDEFLANFSDIHAGELYFVDSDPLQDHNMYNDSQGGDLFQLLMP

SEQ ID NO: 4338 - protein, 343 aa, Homo sapiens
MPPPRTGRGLLWLGLVLSSVCVALGSETQANSTTDALNVLLIIVDDLRPSLGCYGDKLVRSPNIDQLASHSLLFQNAFAQQAVCAPSRVSFLTGRRPDTTRLYDFNSYWRVHAGNFSTIPQYFKENGYVTMSVGKVFHPGISSNHTDDSPYSWSFPPYHPSSEKYENTKTCRGPDGELHANLLCPVDVLDVPEGTLPDKQSTEQAIQLLEKMKTSASPFFLAVGYHKPHIPFRYPKEFQKLYPLENITLAPDPEVPDGLPPVAYNPWMDIRQREDVQALNISVPYGPIPVDFQRKIRQSYFASVSYLDTQVGRLLSALDDLQLANSTIIAFTSDHGFLMRTNT

SEQ ID NO: 4339 - protein, 550 aa, Homo sapiens
MPPPRTGRGLLWLGLVLSSVCVALGSETQANSTTDALNVLLIIVDDLRPSLGCYGDKLVRSPNIDQLASHSLLFQNAFAQQAVCAPSRVSFLTGRRPDTTRLYDFNSYWRVHAGNFSTIPQYFKENGYVTMSVGKVFHPGISSNHTDDSPYSWSFPPYHPSSEKYENTKTCRGPDGELHANLLCPVDVLDVPEGTLPDKQSTEQAIQLLEKMKTSASPFFLAVGYHKPHIPFRYPKEFQKLYPLENITLAPDPEVPDGLPPVAYNPWMDIRQREDVQALNISVPYGPIPVDFQRKIRQSYFASVSYLDTQVGRLLSALDDLQLANSTIIAFTSDHGWALGEHGEWAKYSNFDVATHVPLIFYVPGRTASLPEAGEKLFPYLDPFDSASQLMEPGRQSMDLVELVSLFPTLAGLAGLQVPPRCPVPSFHVELCREGKNLLKHFRFRDLEEDPYLPGNPRELIAYSQYPRPSDIPQWNSDKPSLKDIKIMGYSIRTIDYRYTVWVGFNPDEFLANFSDIHAGELYFVDSDPLQDHNMYNDSQGGDLFQLLMP

SEQ ID NO: 4340 - protein, 361 aa, Homo sapiens
MAAPRAGRGAGWSLRAWRALGGIRWGRRPRLTPDLRALLTSGTSDPRARVTYGTPSLWARLSVGVTEPRACLTSGTPGPRAQLTAVTPDTRTREASENSGTRSRAWLAVALGAGGAVLLLLWGGGRGPPAVLAAVPSPPPASPRSQYNFIADVVEKTAPAVVYIEILDRHPFLGREVPISNGSGFVVAADGLIVTNAHVVADRRRVRVRLLSGDTYEAVVTAVDPVADIATLRIQTKFGNSGGPLVNLDGEVIGVNTMKVTAGISFAIPSDRLREFLHRGEKKNSSSGISGSQRRYIGVMMLTLSPRAGLRPGDVILAIGEQMVQNAEDVYEAVRTQSQLAVQIRRGRETLTLYVTPEVTE

SEQ ID NO: 4341 - protein, 458 aa, Homo sapiens
MAAPRAGRGAGWSLRAWRALGGIRWGRRPRLTPDLRALLTSGTSDPRARVTYGTPSLWARLSVGVTEPRACLTSGTPGPRAQLTAVTPDTRTREASENSGTRSRAWLAVALGAGGAVLLLLWGGGRGPPAVLAAVPSPPPASPRSQYNFIADVVEKTAPAVVYIEILDRHPFLGREVPISNGSGFVVAADGLIVTNAHVVADRRRVRVRLLSGDTYEAVVTAVDPVADIATLRIQTKEPLPTLPLGRSADVRQGEFVVAMGSPFALQNTITSGIVSSAQRPARDLGLPQTNVEYIQTDAAIDFGNSGGPLVNLDGEVIGVNTMKVTAGISFAIPSDRLREFLHRGEKKNSSSGISGSQRRYIGVMMLTLSPSILAELQLREPSFPDVQHGVLIHKVILGSPAHRAGLRPGDVILAIGEQMVQNAEDVYEAVRTQSQLAVQIRRGRETLTLYVTPEVTE

SEQ ID NO: 4342 - protein, 187 aa, Homo sapiens
MWCASPVAVVAFCAGLLVSHPVLTQGQEAGGRPGADCEVCKEFLNRFYKSLIDRGVNFSLDTIEKELISFCLDTKGKENRLCYYLGATKDAATKILSEVTRPMSVHMPAMKICEKLKKLDSQICELKYEKTLDLASVDLRKMRVAELKQILHSWGEECRACAEKTDYVNLIQELAPKYAATHPKTEL

SEQ ID NO: 4343 - protein, 198 aa, Homo sapiens
MADQRQRSLSTSGESLYHVLGLDKNATSDDIKKSYRKLALKYHPDKNPDNPEAADKFKEINNAHAILTDATKRNIYDKYGSLGLYVAEQFGEENVNTYFVLSSWWAKALFVFCGLLTCCYCCCCLCCCFNCCCGKCKPKAPEGEETEFYVSPEDLEAQLQSDEREATDTPIVIQPASATETTQLTADSHPSYHTDGFN

SEQ ID NO: 4344 - protein, 653 aa, Homo sapiens
MRPLRPRAALLALLASLLAAPPVAPAEAPHLVHVDAARALWPLRRFWRSTGFCPPLPHSQADQYVLSWDQQLNLAYVGAVPHRGIKQVRTHWLLELVTTRGSTGRGLSYNFTHLDGYLDLLRENQLLPGFELMGSASGHFTDFEDKQQVFEWKDLVSSLARRYIGRYGLAHVSKWNFETWNEPDHHDFDNVSMTMQGFLNYYDACSEGLRAASPALRLGGPGDSFHTPPRSPLSWGLLRHCHDGTNFFTGEAGVRLDYISLHRKGARSSISILEQEKVVAQQIRQLFPKFADTPIYNDEADPLVGWSLPQPWRADVTYAAMVVKVIAQHQNLLLANTTSAFPYALLSNDNAFLSYHPHPFAQRTLTARFQVNNTRPPHVQLLRKPVLTAMGLLALLDEEQLWAEVSQAGTVLDSNHTVGVLASAHRPQGPADAWRAAVLIYASDDTRAHPNRSVAVTLRLRGVPPGPGLVYVTRYLDNGLCSPDGEWRRLGRPVFPTAEQFRRMRAAEDPVAAAPRPLPAGGRLTLRPALRLPSLLLVHVCARPEKPPGQVTRLRALPLTQGQLVLVWSDEHVGSKCLWTYEIQFSQDGKAYTPVSRKPSTFNLFVFSPDTGAVSGSYRVRALDYWARPGPFSDPVPYLEVPVPRGPPSPGNP

SEQ ID NO: 4345 - protein, 807 aa, Homo sapiens
MRLSPAPLKLSRTPALLALALPLAAALAFSDETLDKVPKSEGYCSRILRAQGTRREGYTEFSLRVEGDPDFYKPGTSYRVTLSAAPPSYFRGFTLIALRENREGDKEEDHAGTFQIIDEEETQFMSNCPVAVTESTPRRRTRIQVFWIAPPAGTGCVILKASIVQKRIIYFQDEGSLTKKLCEQDSTFDGVTDKPILDCCACGTAKYRLTFYGNWSEKTHPKDYPRRANHWSAIIGGSHSKNYVLWEYGGYASEGVKQVAELGSPVKMEEEIRQQSDEVLTVIKAKAQWPAWQPLNVRAAPSAEFSVDRTRHLMSFLTMMGPSPDWNVGLSAEDLCTKECGWVQKVVQDLIPWDAGTDSGVTYESPNKPTIPQEKIRPLTSLDHPQSPFYDPEGGSITQVARVVIERIARKGEQCNIVPDNVDDIVADLAPEEKDEDDTPETCIYSNWSPWSACSSSTCDKGKRMRQRMLKAQLDLSVPCPDTQDFQPCMGPGCSDEDGSTCTMSEWITWSPCSISCGMGMRSRERYVKQFPEDGSVCTLPTEETEKCTVNEECSPSSCLMTEWGEWDECSATCGMGMKKRHRMIKMNPADGSMCKAETSQAEKCMMPECHTIPCLLSPWSEWSDCSVTCGKGMRTRQRMLKSLAELGDCNEDLEQVEKCMLPECPIDCELTEWSQWSECNKSCGKGHVIRTRMIQMEPQFGGAPCPETVQRKKCRIRKCLRNPSIQKLRWREARESRRSEQLKEESEGEQFPGCRMRPWTAWSECTKLCGGGIQERYMTVKKRFKSSQFTSCKDKKEIRACNVHPC

SEQ ID NO: 4346 - protein, 302 aa, Homo sapiens
MEIQELEEIQACQGLWEVFVTLSERARDYLHKTGRFIVIGGIVSPVHDSYGKQGLVSSRHRLIMCQLAVQNSDWIRVDPWECYQDTWQTTCSVLEHHRDLMKRVTGCILSNVNTPSMTPVIGQPQNETPQPIYQNSNVATKPTAAKILGKVGESLSRICCVRPPVERFTFVDENANLGTVMRYEEIELRILLLCGSDLLESFCIPGLWNEADMEVIVGDFGIVVVPRDAADTDRIMNHSSILRKYKNNIMVVKDDINHPMSVVSSTKSRLALQHGDGHVVDYLSQPVIDYILKSQLYINASG

SEQ ID NO: 4347 - protein, 307 aa, Homo sapiens
MTETTKTHVILLACGSFNPITKGHIQMFERARDYLHKTGRFIVIGGIVSPVHDSYGKQGLVSSRHRLIMCQLAVQNSDWIRVDPWECYQDTWQTTCSVLEHHRDLMKRVTGCILSNVNTPSMTPVIGQPQNETPQPIYQNSNVATKPTAAKILGKVGESLSRICCVRPPVERFTFVDENANLGTVMRYEEIELRILLLCGSDLLESFCIPGLWNEADMEVIVGDFGIVVVPRDAADTDRIMNHSSILRKYKNNIMVVKDDINHPMSVVSSTKSRLALQHGDGHVVDYLSQPVIDYILKSQLYINASG

SEQ ID NO: 4348 - protein, 632 aa, Homo sapiens [sequence omitted]

SEQ ID NO: 4349 - protein, 486 aa, Homo sapiens
MVAGMLGLREEKSEDQDLQGLKDKPLKFKKVKKDKKEEKEGKHEPVQPSAHHSAEPAEAGKAETSEGSGSAPAVPEASASPKQRRSIIRDRGPMYDDPTLPEGWTRKLKQRKSGRSAGKYDVYLINPQGKAFRSKVELIAYFEKVGDTSLDPNDFDFTVTGRGSPSRREQKPPKKPKSPKAPGTGRGRGRPKGSGTTRPKAATSEGVQVKRVLEKSPGKLLVKMPFQTSPGGKAEGGGATTSTQVMVIKRPGRKRKAEADPQAIPKKRGRKPGSVVAAAAAEAKKKAVKESSIRSVQETVLPIKKRKTRETVSIEVKEVVKPLLVSTLGEKSGKGLKTCKSPGRKSKESSPKGRSSSASSPPKKEHHHHHHHSESPKAPVPLLPPLPPPPPEPESSEDPTSPPEPQDLSSSVCKEEKMPRGGSLESDGCPKEPAKTQPAVATAATAAEKYKHRGEGERKDIVSSSMPRPNREEPVDSRTPVTERVS

SEQ ID NO: 4350 - protein, 498 aa, Homo sapiens [sequence omitted]

SEQ ID NO: 4351 - protein, 552 aa, Homo sapiens
MRLLPLAPGRLRRGSPRHLPSCSPALLLLVLGGCLGVFGVAAGTRRPNVVLLLTDDQDEVLGGMTPLKKTKALIGEMGMTFSSAYVPSALCCPSRASILTGKYPHNHHVVNNTLEGNCSSKSWQKIQEPNTFPAILRSMCGYQTFFAGKYLNEYGAPDAGGLEHVPLGWSYWYALEKNSKYYNYTLSINGKARKHGENYSVDYLTDVLANVSLDFLDYKSNFEPFFMMIATPAPHSPWTAAPQYQKAFQNVFAPRNKNFNIHGTNKHWLIRQAKTPMTNSSIQFLDNAFRKRWQTLLSVDDLVEKLVKRLEFTGELNNTYIFYTSDNGYHTGQFSLPIDKRQLYEFDIKVPLLVRGPGIKPNQTSKMLVANIDLGPTILDIAGYDLNKTQMDGMSLLPILRGASNLTWRSDVLVEYQGEGRNVTDPTCPSLSPGVSQCFPDCVCEDAYNNTYACVRTMSALWNLQYCEFDDQEVFVEVYNLTADPDQITNIAKTIDPELLGKMNYRLMMLQSCSGPTCRTPGVFDPGYRFDPRLMFSNRGSVRTRRFSKHLL

SEQ ID NO: 4352 - protein, 207 aa, Homo sapiens
MSPLLRRLLLAALLQLAPAQAPVSQPDAPGHQRKVVSWIDVYTRATCQPREVVVPLTVELMGTVAKQLVPSCVTVQRCGGCCPDDGLECVPTGQHQVRMQILMIRYPSSQLGEMSLEEHSQCECRPKKKDSAVKPDRAATPHHRPQPRSVPGWDSAPGAPSPADITHPTPAPGPSAHAAPSTTSALTPGPAAAAADAAASSVAKGGA

SEQ ID NO: 4353 - protein, 735 aa, Homo sapiens
MEGAGGANDKKKISSERRKEKSRDAARSRRSKESEVFYELAHQLPLPHNVSSHLDKASVMRLTISYLRVRKLLDAGDLDIEDDMKAQMNCFYLKALDGFVMVLTDDGDMIYISDNVNKYMGLTQFELTGHSVFDFTHPCDHEEMREMLTHRNGLVKKGKEQNTQRSFFLRMKCTLTSRGRTMNIKSATWKVLHCTGHIHVYDTNSNQPQCGYKKPPMTCLVLICEPIPHPSNIEIPLDSKTFLSRHSLDMKFSYCDERITELMGYEPEELLGRSIYEYYHALDSDHLTKTHHDMFTKGQVTTGQYRMLAKRGGYVWVETQATVIYNTKNSQPQCIVCVNYVVSGIIQHDLIFSLQQTECVLKPVESSDMKMTQLFTKVESEDTSSLFDKLKKEPDALTLLAPAAGDTIISLDFGSNDTETDDQQLEEVPLYNDVMLPSPNEKLQNINLAMSPLPTAETPKPLRSSADPALNQEVALKLEPNPESLELSFTMPQIQDQTPSPSDGSTRQSSPEPNSPSEYCFYVDSDMVNEFKLELVEKLFAEDTEAKNPFSTQDTDLDLEMLAPYIPMDDDFQLRSFDQLSPLESSSASPESASPQSTVTVFQQTQIQEPTANATTTTATTDELKTVTKDRMEDIKILIASPSPTHIHKETTSATSSPYRDTQSRTASPNRAGKGVIEQTEKSHPRSPNVLSVALSQRTTVPEEELNPKILALQNAQRKRKMEHDGSLFQAVGII

SEQ ID NO: 4354 - protein, 826 aa, Homo sapiens
MEGAGGANDKKKISSERRKEKSRDAARSRRSKESEVFYELAHQLPLPHNVSSHLDKASVMRLTISYLRVRKLLDAGDLDIEDDMKAQMNCFYLKALDGFVMVLTDDGDMIYISDNVNKYMGLTQFELTGHSVFDFTHPCDHEEMREMLTHRNGLVKKGKEQNTQRSFFLRMKCTLTSRGRTMNIKSATWKVLHCTGHIHVYDTNSNQPQCGYKKPPMTCLVLICEPIPHPSNIEIPLDSKTFLSRHSLDMKFSYCDERITELMGYEPEELLGRSIYEYYHALDSDHLTKTHHDMFTKGQVTTGQYRMLAKRGGYVWVETQATVIYNTKNSQPQCIVCVNYVVSGIIQHDLIFSLQQTECVLKPVESSDMKMTQLFTKVESEDTSSLFDKLKKEPDALTLLAPAAGDTIISLDFGSNDTETDDQQLEEVPLYNDVMLPSPNEKLQNINLAMSPLPTAETPKPLRSSADPALNQEVALKLEPNPESLELSFTMPQIQDQTPSPSDGSTRQSSPEPNSPSEYCFYVDSDMVNEFKLELVEKLFAEDTEAKNPFSTQDTDLDLEMLAPYIPMDDDFQLRSFDQLSPLESSSASPESASPQSTVTVFQQTQIQEPTANATTTTATTDELKTVTKDRMEDIKILIASPSPTHIHKETTSATSSPYRDTQSRTASPNRAGKGVIEQTEKSHPRSPNVLSVALSQRTTVPEEELNPKILALQNAQRKRKMEHDGSLFQAVGIGTLLQQPDDHAATTSLSWKRVKGCKSSEQNGMEQKTIILIPSDLACRLLGQSMDESGLPQLTSYDCEVNAPIQGSRNLLQGEELLRALDQVN

SEQ ID NO: 4355 - protein, 418 aa, Homo sapiens
MQALVLLLCIGALLGHSSCQNPASPPEEGSPDPDSTGALVEEEDPFFKVPVNKLAAAVSNFGYDLYRVRSSTSPTTNVLLSPLSVATALSALSLGAEQRTESIIHRALYYDLISSPDIHGTYKELLDTVTAPQKNLKSASRIVFEKKLRIKSSFVAPLEKSYGTRPRVLTGNPRLDLQEINNWVQAQMKGKLARSTKEIPDEISILLLGVAHFKGQWVTKFDSRKTSLEDFYLDEERTVRVPMMSDPKAVLRYGLDSDLSCKIAQLPLTGSMSIIFFLPLKVTQNLTLIEESLTSEFIHDIDRELKTVQAVLTVPKLKLSYEGEVTKSLQEMKLQSLFDSPDFSKITGKPIKLTQVEHRAGFEWNEDGAGTTPSPGLQPAHLTFPLDYHLNQPFIFVLRDTDTGALLFIGKILDPRGP

SEQ ID NO: 4356 - protein, 317 aa, Homo sapiens
MTDRQTDTAPSPSYHLLPGRRRTVDAAASRGQGPEPAPGGGVEGVGARGVALKLFVQLLGCSRFGGAVVRAGEAEPSGAARSASSGREEPQPEEGEEEEEKEEERGPQWRLGARKPGSWTGEAAVCADSAPAARAPQALARASGRGGRVARRGAEESGPPHSPSRRGSASRAGPGRASETMNFLLSWVHWSLALLLYLHHAKWSQAAPMAEGGGQNHHEVVKFMDVYQRSYCHPIETLVDIFQEYPDEIEYIFKPSCVPLMRCGGCCNDEGLECVPTEESNITMQIMRIKPHQGQHIGEMSFLQHNKCECRCDKPRR

SEQ ID NO: 4357 - protein, 232 aa, Homo sapiens
MNFLLSWVHWSLALLLYLHHAKWSQAAPMAEGGGQNHHEVVKFMDVYQRSYCHPIETLVDIFQEYPDEIEYIFKPSCVPLMRCGGCCNDEGLECVPTEESNITMQIMRIKPHQGQHIGEMSFLQHNKCECRPKKDRARQEKKSVRGKGKGQKRKRKKSRYKSWSVYVGARCCLMPWSLPGPHPCGPCSERRKHLFVQDPQTCKCSCKNTDSRCKARQLELNERTCRCDKPRR

SEQ ID NO: 4358 - protein, 354 aa, Homo sapiens
MTDRQTDTAPSPSYHLLPGRRRTVDAAASRGQGPEPAPGGGVEGVGARGVALKLFVQLLGCSRFGGAVVRAGEAEPSGAARSASSGREEPQPEEGEEEEEKEEERGPQWRLGARKPGSWTGEAAVCADSAPAARAPQALARASGRGGRVARRGAEESGPPHSPSRRGSASRAGPGRASETMNFLLSWVHWSLALLLYLHHAKWSQAAPMAEGGGQNHHEVVKFMDVYQRSYCHPIETLVDIFQEYPDEIEYIFKPSCVPLMRCGGCCNDEGLECVPTEESNITMQIMRIKPHQGQHIGEMSFLQHNKCECRPKKDRARQENPCGPCSERRKHLFVQDPQTCKCSCKNTDSRCKM

SEQ ID NO: 4359 - protein, 327 aa, Homo sapiens
MTDRQTDTAPSPSYHLLPGRRRTVDAAASRGQGPEPAPGGGVEGVGARGVALKLFVQLLGCSRFGGAVVRAGEAEPSGAARSASSGREEPQPEEGEEEEEKEEERGPQWRLGARKPGSWTGEAAVCADSAPAARAPQALARASGRGGRVARRGAEESGPPHSPSRRGSASRAGPGRASETMNFLLSWVHWSLALLLYLHHAKWSQAAPMAEGGGQNHHEVVKFMDVYQRSYCHPIETLVDIFQEYPDEIEYIFKPSCVPLMRCGGCCNDEGLECVPTEESNITMQIMRIKPHQGQHIGEMSFLQHNKCECRPKKDRARQEKCDKPRR

SEQ ID NO: 4360 - protein, 395 aa, Homo sapiens
MTDRQTDTAPSPSYHLLPGRRRTVDAAASRGQGPEPAPGGGVEGVGARGVALKLFVQLLGCSRFGGAVVRAGEAEPSGAARSASSGREEPQPEEGEEEEEKEEERGPQWRLGARKPGSWTGEAAVCADSAPAARAPQALARASGRGGRVARRGAEESGPPHSPSRRGSASRAGPGRASETMNFLLSWVHWSLALLLYLHHAKWSQAAPMAEGGGQNHHEVVKFMDVYQRSYCHPIETLVDIFQEYPDEIEYIFKPSCVPLMRCGGCCNDEGLECVPTEESNITMQIMRIKPHQGQHIGEMSFLQHNKCECRPKKDRARQEKKSVRGKGKGQKRKRKKSRYKSWSVPCGPCSERRKHLFVQDPQTCKCSCKNTDSRCKARQLELNERTCRCDKPRR

SEQ ID NO: 4361 - protein, 137 aa, Homo sapiens
MNFLLSWVHWSLALLLYLHHAKWSQAAPMAEGGGQNHHEVVKFMDVYQRSYCHPIETLVDIFQEYPDEIEYIFKPSCVPLMRCGGCCNDEGLECVPTEESNITMQIMRIKPHQGQHIGEMSFLQHNKCECRCDKPRR

SEQ ID NO: 4362 - protein, 412 aa, Homo sapiens
MTDRQTDTAPSPSYHLLPGRRRTVDAAASRGQGPEPAPGGGVEGVGARGVALKLFVQLLGCSRFGGAVVRAGEAEPSGAARSASSGREEPQPEEGEEEEEKEEERGPQWRLGARKPGSWTGEAAVCADSAPAARAPQALARASGRGGRVARRGAEESGPPHSPSRRGSASRAGPGRASETMNFLLSWVHWSLALLLYLHHAKWSQAAPMAEGGGQNHHEVVKFMDVYQRSYCHPIETLVDIFQEYPDEIEYIFKPSCVPLMRCGGCCNDEGLECVPTEESNITMQIMRIKPHQGQHIGEMSFLQHNKCECRPKKDRARQEKKSVRGKGKGQKRKRKKSRYKSWSVYVGARCCLMPWSLPGPHPCGPCSERRKHLFVQDPQTCKCSCKNTDSRCKARQLELNERTCRCDKPRR

SEQ ID NO: 4363 - protein, 191 aa, Homo sapiens
MNFLLSWVHWSLALLLYLHHAKWSQAAPMAEGGGQNHHEVVKFMDVYQRSYCHPIETLVDIFQEYPDEIEYIFKPSCVPLMRCGGCCNDEGLECVPTEESNITMQIMRIKPHQGQHIGEMSFLQHNKCECRPKKDRARQENPCGPCSERRKHLFVQDPQTCKCSCKNTDSRCKARQLELNERTCRSLTRKD

SEQ ID NO: 4364 - protein, 371 aa, Homo sapiens
MTDRQTDTAPSPSYHLLPGRRRTVDAAASRGQGPEPAPGGGVEGVGARGVALKLFVQLLGCSRFGGAVVRAGEAEPSGAARSASSGREEPQPEEGEEEEEKEEERGPQWRLGARKPGSWTGEAAVCADSAPAARAPQALARASGRGGRVARRGAEESGPPHSPSRRGSASRAGPGRASETMNFLLSWVHWSLALLLYLHHAKWSQAAPMAEGGGQNHHEVVKFMDVYQRSYCHPIETLVDIFQEYPDEIEYIFKPSCVPLMRCGGCCNDEGLECVPTEESNITMQIMRIKPHQGQHIGEMSFLQHNKCECRPKKDRARQENPCGPCSERRKHLFVQDPQTCKCSCKNTDSRCKARQLELNERTCRCDKPRR

SEQ ID NO: 4365 - protein, 389 aa, Homo sapiens
MTDRQTDTAPSPSYHLLPGRRRTVDAAASRGQGPEPAPGGGVEGVGARGVALKLFVQLLGCSRFGGAVVRAGEAEPSGAARSASSGREEPQPEEGEEEEEKEEERGPQWRLGARKPGSWTGEAAVCADSAPAARAPQALARASGRGGRVARRGAEESGPPHSPSRRGSASRAGPGRASETMNFLLSWVHWSLALLLYLHHAKWSQAAPMAEGGGQNHHEVVKFMDVYQRSYCHPIETLVDIFQEYPDEIEYIFKPSCVPLMRCGGCCNDEGLECVPTEESNITMQIMRIKPHQGQHIGEMSFLQHNKCECRPKKDRARQEKKSVRGKGKGQKRKRKKSRPCGPCSERRKHLFVQDPQTCKCSCKNTDSRCKARQLELNERTCRCDKPRR

SEQ ID NO: 4366 - protein, 371 aa, Homo sapiens
MTDRQTDTAPSPSYHLLPGRRRTVDAAASRGQGPEPAPGGGVEGVGARGVALKLFVQLLGCSRFGGAVVRAGEAEPSGAARSASSGREEPQPEEGEEEEEKEEERGPQWRLGARKPGSWTGEAAVCADSAPAARAPQALARASGRGGRVARRGAEESGPPHSPSRRGSASRAGPGRASETMNFLLSWVHWSLALLLYLHHAKWSQAAPMAEGGGQNHHEVVKFMDVYQRSYCHPIETLVDIFQEYPDEIEYIFKPSCVPLMRCGGCCNDEGLECVPTEESNITMQIMRIKPHQGQHIGEMSFLQHNKCECRPKKDRARQENPCGPCSERRKHLFVQDPQTCKCSCKNTDSRCKARQLELNERTCRSLTRKD

SEQ ID NO: 4367 - protein, 174 aa, Homo sapiens
MNFLLSWVHWSLALLLYLHHAKWSQAAPMAEGGGQNHHEVVKFMDVYQRSYCHPIETLVDIFQEYPDEIEYIFKPSCVPLMRCGGCCNDEGLECVPTEESNITMQIMRIKPHQGQHIGEMSFLQHNKCECRPKKDRARQENPCGPCSERRKHLFVQDPQTCKCSCKNTDSRCKM

SEQ ID NO: 4368 - protein, 191 aa, Homo sapiens
MNFLLSWVHWSLALLLYLHHAKWSQAAPMAEGGGQNHHEVVKFMDVYQRSYCHPIETLVDIFQEYPDEIEYIFKPSCVPLMRCGGCCNDEGLECVPTEESNITMQIMRIKPHQGQHIGEMSFLQHNKCECRPKKDRARQENPCGPCSERRKHLFVQDPQTCKCSCKNTDSRCKARQLELNERTCRCDKPRR

SEQ ID NO: 4369 - protein, 209 aa, Homo sapiens
MNFLLSWVHWSLALLLYLHHAKWSQAAPMAEGGGQNHHEVVKFMDVYQRSYCHPIETLVDIFQEYPDEIEYIFKPSCVPLMRCGGCCNDEGLECVPTEESNITMQIMRIKPHQGQHIGEMSFLQHNKCECRPKKDRARQEKKSVRGKGKGQKRKRKKSRPCGPCSERRKHLFVQDPQTCKCSCKNTDSRCKARQLELNERTCRCDKPRR

SEQ ID NO: 4370 - protein, 215 aa, Homo sapiens
MNFLLSWVHWSLALLLYLHHAKWSQAAPMAEGGGQNHHEVVKFMDVYQRSYCHPIETLVDIFQEYPDEIEYIFKPSCVPLMRCGGCCNDEGLECVPTEESNITMQIMRIKPHQGQHIGEMSFLQHNKCECRPKKDRARQEKKSVRGKGKGQKRKRKKSRYKSWSVPCGPCSERRKHLFVQDPQTCKCSCKNTDSRCKARQLELNERTCRCDKPRR

SEQ ID NO: 4371 - protein, 147 aa, Homo sapiens
MNFLLSWVHWSLALLLYLHHAKWSQAAPMAEGGGQNHHEVVKFMDVYQRSYCHPIETLVDIFQEYPDEIEYIFKPSCVPLMRCGGCCNDEGLECVPTEESNITMQIMRIKPHQGQHIGEMSFLQHNKCECRPKKDRARQEKCDKPRR

SEQ ID NO: 4372 - protein, 247 aa, Homo sapiens
MLQNSAVLLVLVISASATHEAEQNDSVSPRKSRVAAQNSAEVVRCLNSALQVGCGAFACLENSTCDTDGMYDICKSFLYSAAKFDTQGKAFVKESLKCIANGVTSKVFLAIRRCSTFQRMIAEVQEECYSKLNVCSIAKRNPEAITEVVQLPNHFSNRYYNRLVRSLLECDEDTVSTIRDSLMEKIGPNMASLFHILQTDHCAQTHPRADFNRRRTNEPQKLKVLLRNLRGEEDSPSHIKRTSHESA

SEQ ID NO: 4373 - protein, 151 aa, Homo sapiens
MERPEPELIRQSWRAVSRSPLEHGTVLFARLFALEPDLLPLFQYNCRQFSSPEDCLSSPEFLDHIRKVMLVIDAAVTNVEDLSSLEEYLASLGRKHRAVGVKLSSFSTVGESLLYMLEKCLGPAFTPATRAAWSQLYGAVVQAMSRGWDGE

SEQ ID NO: 4374 - protein, 589 aa, Homo sapiens
MDLIDILWRQDIDLGVSREVFDFSQRRKEYELEKQKKLEKERQEQLQKEQEKAFFAQLQLDEETGEFLPIQPAQHIQSETSGSANYSQVAHIPKSDALYFDDCMQLLAQTFPFVDDNEVSSATFQSLVPDIPGHIESPVFIATNQAQSPETSVAQVAPVDLDGMQQDIEQVWEELLSIPELQCLNIENDKLVETTMVPSPEAKLTEVDNYHFYSSIPSMEKEVGNCSPHFLNAFEDSFSSILSTEDPNQLTVNSLNSDATVNTDFGDEFYSAFIAEPSISNSMPSPATLSHSLSELLNGPIDVSDLSLCKAFNQNHPESTAEFNDSDSGISLNTSPSVASPEHSVESSSYGDTLLGLSDSEVEELDSAPGSVKQNGPKTPVHSSGDMVQPLSPSQGQSTHVHDAQCENTPEKELPVSPGHRKTPFTKDKHSSRLEAHLTRDELRAKALHIPFPVEKIINLPVVDFNEMMSKEQFNEAQLALIRDIRRRGKNKVAAQNCRKRKLENIVELEQDLDHLKDEKEKLLKEKGENDKSLHLLKKQLSTLYLEVFSMLRDEDGKPYSPSEYSLQQTRDGNVFLVPKSKKPDVKKN

SEQ ID NO: 4375 - protein, 605 aa, Homo sapiens
MMDLELPPPGLPSQQDMDLIDILWRQDIDLGVSREVFDFSQRRKEYELEKQKKLEKERQEQLQKEQEKAFFAQLQLDEETGEFLPIQPAQHIQSETSGSANYSQVAHIPKSDALYFDDCMQLLAQTFPFVDDNEVSSATFQSLVPDIPGHIESPVFIATNQAQSPETSVAQVAPVDLDGMQQDIEQVWEELLSIPELQCLNIENDKLVETTMVPSPEAKLTEVDNYHFYSSIPSMEKEVGNCSPHFLNAFEDSFSSILSTEDPNQLTVNSLNSDATVNTDFGDEFYSAFIAEPSISNSMPSPATLSHSLSELLNGPIDVSDLSLCKAFNQNHPESTAEFNDSDSGISLNTSPSVASPEHSVESSSYGDTLLGLSDSEVEELDSAPGSVKQNGPKTPVHSSGDMVQPLSPSQGQSTHVHDAQCENTPEKELPVSPGHRKTPFTKDKHSSRLEAHLTRDELRAKALHIPFPVEKIINLPVVDFNEMMSKEQFNEAQLALIRDIRRRGKNKVAAQNCRKRKLENIVELEQDLDHLKDEKEKLLKEKGENDKSLHLLKKQLSTLYLEVFSMLRDEDGKPYSPSEYSLQQTRDGNVFLVPKSKKPDVKKN

SEQ ID NO: 4376 - protein, 582 aa, Homo sapiens
MDLIDILWRQDIDLGVSREVFDFSQRRKEYELEKQKKLEKERQEQLQKEQEKAFFAQLQLDEETGEFLPIQPAQHIQSETSGSANYSQVAHIPKSDALYFDDCMQLLAQTFPFVDDNESLVPDIPGHIESPVFIATNQAQSPETSVAQVAPVDLDGMQQDIEQVWEELLSIPELQCLNIENDKLVETTMVPSPEAKLTEVDNYHFYSSIPSMEKEVGNCSPHFLNAFEDSFSSILSTEDPNQLTVNSLNSDATVNTDFGDEFYSAFIAEPSISNSMPSPATLSHSLSELLNGPIDVSDLSLCKAFNQNHPESTAEFNDSDSGISLNTSPSVASPEHSVESSSYGDTLLGLSDSEVEELDSAPGSVKQNGPKTPVHSSGDMVQPLSPSQGQSTHVHDAQCENTPEKELPVSPGHRKTPFTKDKHSSRLEAHLTRDELRAKALHIPFPVEKIINLPVVDFNEMMSKEQFNEAQLALIRDIRRRGKNKVAAQNCRKRKLENIVELEQDLDHLKDEKEKLLKEKGENDKSLHLLKKQLSTLYLEVFSMLRDEDGKPYSPSEYSLQQTRDGNVFLVPKSKKPDVKKN

SEQ ID NO: 4377 - protein, 816 aa, Homo sapiens
MAEPLKEEDGEDGSAEPPGPVKAEPAHTAASVAAKNLALLKARSFDVTFDVGDEYEIIETIGNGAYGVVSSARRRLTGQQVAIKKIPNAFDVVTNAKRTLRELKILKHFKHDNIIAIKDILRPTVPYGEFKSVYVVLDLMESDLHQIIHSSQPLTLEHVRYFLYQLLRGLKYMHSAQVIHRDLKPSNLLVNENCELKIGDFGMARGLCTSPAEHQYFMTEYVATRWYRAPELMLSLHEYTQAIDLWSVGCIFGEMLARRQLFPGKNYVHQLQLIMMVLGTPSPAVIQAVGAERVRAYIQSLPPRQPVPWETVYPGADRQALSLLGRMLRFEPSARISAAAALRHPFLAKYHDPDDEPDCAPPFDFAFDREALTRERIKEAIVAEIEDFHARREGIRQQIRFQPSLQPVASEPGCPDVEMPSPWAPSGDCAMESPPPAPPPCPGPAPDTIDLTLQPPPPVSEPAPPKKDGAISDNTKAALKAALLKSLRSRLRDGPSAPLEAPEPRKPVTAQERQREREEKRRRRQERAKEREKRRQERERKERGAGASGGPSTDPLAGLVLSDNDRSLLERWTRMARPAAPALTSVPAPAPAPTPTPTPVQPTSPPPGPVAQPTGPQPQSAGSTSGPVPQPACPPPGPAPHPTGPPGPIPVPAPPQIATSTSLLAAQSLVPPPGLPGSSTPGVLPYFPPGLPPPDAGGAPQSSMSESPDVNLVTQQLSKSQVEDPLPPVFSGTPKGSGAGYGVGFDLEEFLNQSFDMGVADGPQDGQADSASLSASLLADWLEGHGMNPADIESLQREIQMDSPMLLADLPDLQDP

SEQ ID NO: 4378 - protein, 816 aa, Homo sapiens; identical to SEQ ID NO: 4377

SEQ ID NO: 4379 - protein, 677 aa, Homo sapiens
MESDLHQIIHSSQPLTLEHVRYFLYQLLRGLKYMHSAQVIHRDLKPSNLLVNENCELKIGDFGMARGLCTSPAEHQYFMTEYVATRWYRAPELMLSLHEYTQAIDLWSVGCIFGEMLARRQLFPGKNYVHQLQLIMMVLGTPSPAVIQAVGAERVRAYIQSLPPRQPVPWETVYPGADRQALSLLGRMLRFEPSARISAAAALRHPFLAKYHDPDDEPDCAPPFDFAFDREALTRERIKEAIVAEIEDFHARREGIRQQIRFQPSLQPVASEPGCPDVEMPSPWAPSGDCAMESPPPAPPPCPGPAPDTIDLTLQPPPPVSEPAPPKKDGAISDNTKAALKAALLKSLRSRLRDGPSAPLEAPEPRKPVTAQERQREREEKRRRRQERAKEREKRRQERERKERGAGASGGPSTDPLAGLVLSDNDRSLLERWTRMARPAAPALTSVPAPAPAPTPTPTPVQPTSPPPGPVAQPTGPQPQSAGSTSGPVPQPACPPPGPAPHPTGPPGPIPVPAPPQIATSTSLLAAQSLVPPPGLPGSSTPGVLPYFPPGLPPPDAGGAPQSSMSESPDVNLVTQQLSKSQVEDPLPPVFSGTPKGSGAGYGVGFDLEEFLNQSFDMGVADGPQDGQADSASLSASLLADWLEGHGMNPADIESLQREIQMDSPMLLADLPDLQDP

SEQ ID NO: 4380 - protein, 816 aa, Homo sapiens; identical to SEQ ID NO: 4377

SEQ ID NO: 4381 - protein, 279 aa, Homo sapiens
MENSEKTEVVLLACGSFNPITNMHLRLFELAKDYMNGTGRYTVVKGIISPVGDAYKKKGLIPAYHRVIMAELATKNSKWVEVDTWESLQKEWKETLKVLRHHQEKLEASDCDHQQNSPTLERPGRKRKWTETQDSSQKKSLEPKTKAVPKVKLLCGADLLESFAVPNLWKSEDITQIVANYGLICVTRAGNDAQKFIYESDVLWKHRSNIHVVNEWIANDISSTKIRRALRRGQSIRYLVPDLVQEYIEKHNLYSSESEDRNAGVILAPLQRNTAEAKT

SEQ ID NO: 4382 - protein, 241 aa, Homo sapiens
MSMLFYTLITAFLIGIQAEPHSESNVPAGHTIPQAHWTKLQHSLDTALRRARSAPAAAIAARVAGQTRNITVDPRLFKKRRLRSPRVLFSTQPPREAADTQDLDFEVGGAAPFNRTHRSKRSSSHPIFHRGEFSVCDSVSVWVGDKTTATDIKGKEVMVLGEVNINNSVFKQYFFETKCRDPNPVDSGCRGIDSKHWNSYCTTTHTFVKALTMDGKQAAWRFIRIDTACVCVLSRKAVRRA

SEQ ID NO: 4383 - protein, 743 aa, Homo sapiens
MEAVAVAAAVGVLLLAGAGGAAGDEAREAAAVRALVARLLGPGPAADFSVSVERALAAKPGLDTYSLGGGGAARVRVRGSTGVAAAAGLHRYLRDFCGCHVAWSGSQLRLPRPLPAVPGELTEATPNRYRYYQNVCTQSYSFVWWDWARWEREIDWMALNGINLALAWSGQEAIWQRVYLALGLTQAEINEFFTGPAFLAWGRMGNLHTWDGPLPPSWHIKQLYLQHRVLDQMRSFGMTPVLPAFAGHVPEAVTRVFPQVNVTKMGSWGHFNCSYSCSFLLAPEDPIFPIIGSLFLRELIKEFGTDHIYGADTFNEMQPPSSEPSYLAAATTAVYEAMTAVDTEAVWLLQGWLFQHQPQFWGPAQIRAVLGAVPRGRLLVLDLFAESQPVYTRTASFQGQPFIWCMLHNFGGNHGLFGALEAVNGGPEAARLFPNSTMVGTGMAPEGISQNEVVYSLMAELGWRKDPVPDLAAWVTSFAARRYGVSHPDAGAAWRLLLRSVYNCSGEACRGHNRSPLVRRPSLQMNTSIWYNRSDVFEAWRLLLTSAPSLATSPAFRYDLLDLTRQAVQELVSLYYEEARSAYLSKELASLLRAGGVLAYELLPALDEVLASDSRFLLGSWLEQARAAAVSEAEADFYEQNSRYQLTLWGPEGNILDYANKQLAGLVANYYTPRWRLFLEALVDSVAQGIPFQQHQFDKNVFQLEQAFVLSKQRYPSQPRGDTVDLAKKIFLKYYPRWVAGSW

SEQ ID NO: 4384 - protein, 449 aa, Homo sapiens
MMKTLLLFVGLLLTWESGQVLGDQTVSDNELQEMSNQGSKYVNKEIQNAVNGVKQIKTLIEKTNEERKTLLSNLEEAKKKKEDALNETRESETKLKELPGVCNETMMALWEECKPCLKQTCMKFYARVCRSGSGLVGRQLEEFLNQSSPFYFWMNGDRIDSLLENDRQQTHMLDVMQDHFSRASSIIDELFQDRFFTREPQDTYHYLPFSLPHRRPHFFFPKSRIVRSLMPFSPYEPLNFHAMFQPFLEMIHEAQQAMDIHFHSPAFQHPPTEFIREGDDDRTVCREIRHNSTGCLRMKDQCDKCREILSVDCSTNNPSQAKLRRELDESLQVAERLTRKYNELLKSYQWKMLNTSSLLEQLNEQFNWVSRLANLTQGEDQYYLRVTTVASHTSDSDVPSGVTEVVVKLFDSDPITVTVPVEVSRKNPKFMETVAEKALQEYRKKHREE

SEQ ID NO: 4385 - protein, 750 aa, Homo sapiens
MGKSESQMDITDINTPKPKKKQRWTPLEISLSVLVLLLTIIAVTMIALYATYDDGICKSSDCIKSAARLIQNMDATTEPCTDFFKYACGGWLKRNVIPETSSRYGNFDILRDELEVVLKDVLQEPKTEDIVAVQKAKALYRSCINESAIDSRGGEPLLKLLPDIYGWPVATENWEQKYGASWTAEKAIAQLNSKYGKKVLINLFVGTDDKNSVNHVIHIDQPRLGLPSRDYYECTGIYKEACTAYVDFMISVARLIRQEERLPIDENQLALEMNKVMELEKEIANATAKPEDRNDPMLLYNKMTLAQIQNNFSLEINGKPFSWLNFTNEIMSTVNISITNEEDVVVYAPEYLTKLKPILTKYSARDLQNLMSWRFIMDLVSSLSRTYKESRNAFRKALYGTTSETATWRRCANYVNGNMENAVGRLYVEAAFAGESKHVVEDLIAQIREVFIQTLDDLTWMDAETKKRAEEKALAIKERIGYPDDIVSNDNKLNNEYLELNYKEDEYFENIIQNLKFSQSKQLKKLREKVDKDEWISGAAVVNAFYSSGRNQIVFPAGILQPPFFSAQQSNSLNYGGIGMVIGHEITHGFDDNGRNFNKDGDLVDWWTQQSASNFKEQSQCMVYQYGNFSWDLAGGQHLNGINTLGENIADNGGLGQAYRAYQNYIKKNGEEKLLPGLDLNHKQLFFLNFAQVWCGTYRPEYAVNSIKTDVHSPGNFRIIGTLQNSAEFSEAFHCRKNSYMNPEKKCRVW

SEQ ID NO: 4386 - protein, 750 aa, Homo sapiens; identical to SEQ ID NO: 4385

SEQ ID NO: 4387 - protein, 750 aa, Homo sapiens; identical to SEQ ID NO: 4385

SEQ ID NO: 4388 - protein, 750 aa, Homo sapiens; identical to SEQ ID NO: 4385

SEQ ID NO: 4389 - protein, 480 aa, Homo sapiens
MIRAAPPPLFLLLLLLLLLVSWASRGEAAPDQDEIQRLPGLAKQPSFRQYSGYLKGSGSKHLHYWFVESQKDPENSPVVLWLNGGPGCSSLDGLLTEHGPFLVQPDGVTLEYNPYSWNLIANVLYLESPAGVGFSYSDDKFYATNDTEVAQSNFEALQDFFRLFPEYKNNKLFLTGESYAGIYIPTLAVLVMQDPSMNLQGLAVGNGLSSYEQNDNSLVYFAYYHGLLGNRLWSSLQTHCCSQNKCNFYDNKDLECVTNLQEVARIVGNSGLNIYNLYAPCAGGVPSHFRYEKDTVVVQDLGNIFTRLPLKRMWHQALLRSGDKVRMDPPCTNTTAASTYLNNPYVRKALNIPEQLPQWDMCNFLVNLQYRRLYRSMNSQYLKLLSSQKYQILLYNGDVDMACNFMGDEWFVDSLNQKMEVQRRPWLVKYGDSGEQIAGFVKEFSHIAFLTIKGAGHMVPTDKPLAAFTMFSRFLNKQPY

SEQ ID NO: 4390 - protein, 498 aa, Homo sapiens
MTSSPRAPPGEQGRGGAEMIRAAPPPLFLLLLLLLLLVSWASRGEAAPDQDEIQRLPGLAKQPSFRQYSGYLKGSGSKHLHYWFVESQKDPENSPVVLWLNGGPGCSSLDGLLTEHGPFLVQPDGVTLEYNPYSWNLIANVLYLESPAGVGFSYSDDKFYATNDTEVAQSNFEALQDFFRLFPEYKNNKLFLTGESYAGIYIPTLAVLVMQDPSMNLQGLAVGNGLSSYEQNDNSLVYFAYYHGLLGNRLWSSLQTHCCSQNKCNFYDNKDLECVTNLQEVARIVGNSGLNIYNLYAPCAGGVPSHFRYEKDTVVVQDLGNIFTRLPLKRMWHQALLRSGDKVRMDPPCTNTTAASTYLNNPYVRKALNIPEQLPQWDMCNFLVNLQYRRLYRSMNSQYLKLLSSQKYQILLYNGDVDMACNFMGDEWFVDSLNQKMEVQRRPWLVKYGDSGEQIAGFVKEFSHIAFLTIKGAGHMVPTDKPLAAFTMFSRFLNKQPY

SEQ ID NO: 4391 - protein, 481 aa, Homo sapiens
MTSSPRAPPGEQGRGGAEMIRAAPPPLFLLLLLLLLLVSWASRGEAAPDQDEIQRLPGLAKQPSFRQYSGYLKGSGSKHLHYWFVESQKDPENSPVVLWLNGGPGCSSLDGLLTEHGPFLIANVLYLESPAGVGFSYSDDKFYATNDTEVAQSNFEALQDFFRLFPEYKNNKLFLTGESYAGIYIPTLAVLVMQDPSMNLQGLAVGNGLSSYEQNDNSLVYFAYYHGLLGNRLWSSLQTHCCSQNKCNFYDNKDLECVTNLQEVARIVGNSGLNIYNLYAPCAGGVPSHFRYEKDTVVVQDLGNIFTRLPLKRMWHQALLRSGDKVRMDPPCTNTTAASTYLNNPYVRKALNIPEQLPQWDMCNFLVNLQYRRLYRSMNSQYLKLLSSQKYQILLYNGDVDMACNFMGDEWFVDSLNQKMEVQRRPWLVKYGDSGEQIAGFVKEFSHIAFLTIKGAGHMVPTDKPLAAFTMFSRFLNKQPY

SEQ ID NO: 4392 - protein, 306 aa, Homo sapiens
MASPGCLWLLAVALLPWTCASRALQHLDPPAPLPLVIWHGMGDSCCNPLSMGAIKKMVEKKIPGIYVLSLEIGKTLMEDVENSFFLNVNSQVTTVCQALAKDPKLQQGYNAMGFSQGGQFLRAVAQRCPSPPMINLISVGGQHQGVFGLPRCPGESSHICDFIRKTLNAGAYSKVVQERLVQAEYWHDPIKEDVYRNHSIFLADINQERGINESYKKNLMALKKFVMVKFLNDSIVDPVDSEWFGFYRSGQAKETIPLQETSLYTQDRLGLKEMDNAGQLVFLATEGDHLQLSEEWFYAHIIPFLG

SEQ ID NO: 4393 - protein, 203 aa, Homo sapiens
MASPGCLWLLAVALLPWTCASRALQHLDPPAPLPLVIWHGMGVFGLPRCPGESSHICDFIRKTLNAGAYSKVVQERLVQAEYWHDPIKEDVYRNHSIFLADINQERGINESYKKNLMALKKFVMVKFLNDSIVDPVDSEWFGFYRSGQAKETIPLQETSLYTQDRLGLKEMDNAGQLVFLATEGDHLQLSEEWFYAHIIPFLG

SEQ ID NO: 4394 - protein, 220 aa, Homo sapiens
MGAAARTLRLALGLLLLATLLRPADACSCSPVHPQQAFCNADVVIRAKAVSEKEVDSGNDIYGNPIKRIQYEIKQIKMFKGPEKDIEFIYTAPSSAVCGVSLDVGGKKEYLIAGKAEGDGKMHITLCDFIVPWDTLSTTQKKSLNHRYQMGCECKITRCPMIPCYISSPDECLWMDWVTEKNINGHQAKFFACIKRSDGSCAWYRGAAPPKQEFLDIEDP

SEQ ID NO: 4395 - protein, 185 aa, Homo sapiens
MRRMRRMWATQGLAVALALSVLPGSRALRPGDCEVCISYLGRFYQDLKDRDVTFSPATIENELIKFCREARGKENRLCYYIGATDDAATKIINEVSKPLAHHIPVEKICEKLKKKDSQICELKYDKQIDLSTVDLKKLRVKELKKILDDWGETCKGCAEKSDYIRKINELMPKYAPKAASARTDL

SEQ ID NO: 4396 - protein, 207 aa, Homo sapiens
MAPFEPLASGILLLLWLIAPSRACTCVPPHPQTAFCNSDLVIRAKFVGTPEVNQTTLYQRYEIKMTKMYKGFQALGDAADIRFVYTPAMESVCGYFHRSHNRSEEFLIAGKLQDGLLHITTCSFVAPWNSLSLAQRRGFTKTYTVGCEECTVFPCLSIPCKLQSGTHCLWTDQLLQGSEKGFQSRHLACLPREPGLCTWQSLRSQIA

SEQ ID NO: 4397 - protein, 585 aa, Homo sapiens
MASPGSGFWSFGSEDGSGDSENPGTARAWCQVAQKFTGGIGNKLCALLYGDAEKPAESGGSQPPRAAARKAACACDQKPCSCSKVDVNYAFLHATDLLPACDGERPTLAFLQDVMNILLQYVVKSFDRSTKVIDFHYPNELLQEYNWELADQPQNLEEILMHCQTTLKYAIKTGHPRYFNQLSTGLDMVGLAADWLTSTANTNMFTYEIAPVFVLLEYVTLKKMREIIGWPGGSGDGIFSPGGAISNMYAMMIARFKMFPEVKEKGMAALPRLIAFTSEHSHFSLKKGAAALGIGTDSVILIKCDERGKMIPSDLERRILEAKQKGFVPFLVSATAGTTVYGAFDPLLAVADICKKYKIWMHVDAAWGGGLLMSRKHKWKLSGVERANSVTWNPHKMMGVPLQCSALLVREEGLMQNCNQMHASYLFQQDKHYDLSYDTGDKALQCGRHVDVFKLWLMWRAKGTTGFEAHVDKCLELAEYLYNIIKNREGYEMVFDGKPQHTNVCFWYIPPSLRTLEDNEERMSRLSKVAPVIKARMMEYGTTMVSYQPLGDKVNFFRMVISNPAATHQDIDFLIEEIERLGQDL

SEQ ID NO: 4398 - protein, 585 aa, Homo sapiens; identical to SEQ ID NO: 4397

SEQ ID NO: 4399 - protein, 685 aa, Homo sapiens
MAEWLLSASWQRRAKAMTAAAGSAGRAAVPLLLCALLAPGGAYVLDDSDGLGREFDGIGAVSGGGATSRLLVNYPEPYRSQILDYLFKPNFGASLHILKVEIGGDGQTTDGTEPSHMHYALDENYFRGYEWWLMKEAKKRNPNITLIGLPWSFPGWLGKGFDWPYVNLQLTAYYVVTWIVGAKRYHDLDIDYIGIWNERSYNANYIKILRKMLNYQGLQRVKIIASDNLWESISASMLLDAELFKVVDVIGAHYPGTHSAKDAKLTGKKLWSSEDFSTLNSDMGAGCWGRILNQNYINGYMTSTIAWNLVASYYEQLPYGRCGLMTAQEPWSGHYVVESPVWVSAHTTQFTQPGWYYLKTVGHLEKGGSYVALTDGLGNLTIIIETMSHKHSKCIRPFLPYFNVSQQFATFVLKGSFSEIPELQVWYTKLGKTSERFLFKQLDSLWLLDSDGSFTLSLHEDELFTLTTLTTGRKGSYPLPPKSQPFPSTYKDDFNVDYPFFSEAPNFADQTGVFEYFTNIEDPGEHHFTLRQVLNQRPITWAADASNTISIIGDYNWTNLTIKCDVYIETPDTGGVFIAGRVNKGGILIRSARGIFFWIFANGSYRVTGDLAGWIIYALGRVEVTAKKWYTLTLTIKGHFTSGMLNDKSLWTDIPVNFPKNGWAAIGTHSFEFAQFDNFLVEATR

SEQ ID NO: 4400 - protein, 594 aa, Homo sapiens
MASSTPSSSATSSNAGADPNTTNLRPTTYDTWCGVAHGCTRKLGLKICGFLQRTNSLEEKSRLVSAFKERQSSKNLLSCENSDRDARFRRTETDFSNLFARDLLPAKNGEEQTVQFLLEVVDILLNYVRKTFDRSTKVLDFHHPHQLLEGMEGFNLELSDHPESLEQILVDCRDTLKYGVRTGHPRFFNQLSTGLDIIGLAGEWLTSTANTNMFTYEIAPVFVLMEQITLKKMREIVGWSSKDGDGIFSPGGAISNMYSIMAARYKYFPEVKTKGMAAVPKLVLFTSEQSHYSIKKAGAALGFGTDNVILIKCNERGKIIPADFEAKILEAKQKGYVPFYVNATAGTTVYGAFDPIQEIADICEKYNLWLHVDAAWGGGLLMSRKHRHKLNGIERANSVTWNPHKMMGVLLQCSAILVKEKGILQGCNQMCAGYLFQPDKQYDVSYDTGDKAIQCGRHVDIFKFWLMWKAKGTVGFENQINKCLELAEYLYAKIKNREEFEMVFNGEPEHTNVCFWYIPQSLRGVPDSPQRREKLHKVAPKIKALMMESGTTMVGYQPQGDKANFFRMVISNPAATQSDIDFLIEEIERLGQDL

SEQ ID NO: 4401 - protein, 224 aa, Homo sapiens
MASSTPSSSATSSNAGADPNTTNLRPTTYDTWCGVAHGCTRKLGLKICGFLQRTNSLEEKSRLVSAFKERQSSKNLLSCENSDRDARFRRTETDFSNLFARDLLPAKNGEEQTVQFLLEVVDILLNYVRKTFDRSTKVLDFHHPHQLLEGMEGFNLELSDHPESLEQILVDCRDTLKYGVRTGHPRFFNQLSTGLDIIGLAGEWLTSTANTNMPSDMRECWLLR

SEQ ID NO: 4402 - protein, 257 aa, Homo sapiens
MSILFYVIFLAYLRGIQGNNMDQRSLPEDSLNSLIIKLIQADILKNKLSKQMVDVKENYQSTLPKAEAPREPERGGPAKSAFQPVIAMDTELLRQQRRYNSPRVLLSDSTPLEPPPLYLMEDYVGSPVVANRTSRRKRYAEHKSHRGEYSVCDSESLWVTDKSSAIDIRGHQVTVLGEIKTGNSPVKQYFYETRCKEARPVKNGCRGIDDKHWNSQCKTSQTYVRALTSENNKLVGWRWIRIDTSCVCALSRKIGRT

SEQ ID NO: 4403 - protein, 270 aa, Homo sapiens
MVTFATILQVNKVMSILFYVIFLAYLRGIQGNNMDQRSLPEDSLNSLIIKLIQADILKNKLSKQMVDVKENYQSTLPKAEAPREPERGGPAKSAFQPVIAMDTELLRQQRRYNSPRVLLSDSTPLEPPPLYLMEDYVGSPVVANRTSRRKRYAEHKSHRGEYSVCDSESLWVTDKSSAIDIRGHQVTVLGEIKTGNSPVKQYFYETRCKEARPVKNGCRGIDDKHWNSQCKTSQTYVRALTSENNKLVGWRWIRIDTSCVCALSRKIGRT

SEQ ID NO: 4404 - protein, 651 aa, Homo sapiens
MARGSAVAWAALGPLLWGCALGLQGGMLYPQESPSRECKELDGLWSFRADFSDNRRRGFEEQWYRRPLWESGPTVDMPVPSSFNDISQDWRLRHFVGWVWYEREVILPERWTQDLRTRVVLRIGSAHSYAIVWVNGVDTLEHEGGYLPFEADISNLVQVGPLPSRLRITIAINNTLTPTTLPPGTIQYLTDTSKYPKGYFVQNTYFDFFNYAGLQRSVLLYTTPTTYIDDITVTTSVEQDSGLVNYQISVKGSNLFKLEVRLLDAENKVVANGTGTQGQLKVPGVSLWWPYLMHERPAYLYSLEVQLTAQTSLGPVSDFYTLPVGIRTVAVTKSQFLINGKPFYFHGVNKHEDADIRGKGFDWPLLVKDFNLLRWLGANAFRTSHYPYAEEVMQMCDRYGIVVIDECPGVGLALPQFFNNVSLHHHMQVMEEVVRRDKNHPAVVMWSVANEPASHLESAGYYLKMVIAHTKSLDPSRPVTFVSNSNYAADKGAPYVDVICLNSYYSWYHDYGHLELIQLQLATQFENWYKKYQKPIIQSEYGAETIAGFHQDPPLMFTEEYQKSLLEQYHLGLDQKRRKYVVGELIWNFADFMTEQSPTRVLGNKKGIFTRQRQPKSAAFLLRERYWKIANETRYPHSVAKSQCLENSLFT

SEQ ID NO: 4405 - protein, 723 aa, Homo sapiens
MWVTKLLPALLLQHVLLHLLLLPIAIPYAEGQRKRRNTIHEFKKSAKTTLIKIDPALKIKTKKVNTADQCANRCTRNKGLPFTCKAFVFDKARKQCLWFPFNSMSSGVKKEFGHEFDLYENKDYIRNCIIGKGRSYKGTVSITKSGIKCQPWSSMIPHEHSYRGKDLQENYCRNPRGEEGGPWCFTSNPEVRYEVCDIPQCSEVECMTCNGESYRGLMDHTESGKICQRWDHQTPHRHKFLPERYPDKGFDDNYCRNPDGQPRPWCYTLDPHTRWEYCAIKTCADNTMNDTDVPLETTECIQGQGEGYRGTVNTIWNGIPCQRWDSQYPHEHDMTPENFKCKDLRENYCRNPDGSESPWCFTTDPNIRVGYCSQIPNCDMSHGQDCYRGNGKNYMGNLSQTRSGLTCSMWDKNMEDLHRHIFWEPDASKLNENYCRNPDDDAHGPWCYTGNPLIPWDYCPISRCEGDTTPTIVNLDHPVISCAKTKQLRVVNGIPTRTNIGWMVSLRYRNKHICGGSLIKESWVLTARQCFPSRDLKDYEAWLGIHDVHGRGDEKCKQVLNVSQLVYGPEGSDLVLMKLARPAVLDDFVSTIDLPNYGCTIPEKTSCSVYGWGYTGLINYDGLLRVAHLYIMGNEKCSQHHRGKVTLNESEICAGAEKIGSGPCEGDYGGPLVCEQHKMRMVLGVIVPGRGCAIPNRPGIFVRVAYYAKWIHKIILTYKVPQS

SEQ ID NO: 4406 - protein, 290 aa, Homo sapiens
MWVTKLLPALLLQHVLLHLLLLPIAIPYAEGQRKRRNTIHEFKKSAKTTLIKIDPALKIKTKKVNTADQCANRCTRNKGLPFTCKAFVFDKARKQCLWFPFNSMSSGVKKEFGHEFDLYENKDYIRNCIIGKGRSYKGTVSITKSGIKCQPWSSMIPHEHSFLPSSYRGKDLQENYCRNPRGEEGGPWCFTSNPEVRYEVCDIPQCSEVECMTCNGESYRGLMDHTESGKICQRWDHQTPHRHKFLPERYPDKGFDDNYCRNPDGQPRPWCYTLDPHTRWEYCAIKTCET

SEQ ID NO: 4407 - protein, 210 aa, Homo sapiens
MWVTKLLPALLLQHVLLHLLLLPIAIPYAEGQRKRRNTIHEFKKSAKTTLIKIDPALKIKTKKVNTADQCANRCTRNKGLPFTCKAFVFDKARKQCLWFPFNSMSSGVKKEFGHEFDLYENKDYIRNCIIGKGRSYKGTVSITKSGIKCQPWSSMIPHEHSFLPSSYRGKDLQENYCRNPRGEEGGPWCFTSNPEVRYEVCDIPQCSEGK

SEQ ID NO: 4408 - protein, 728 aa, Homo sapiens
MWVTKLLPALLLQHVLLHLLLLPIAIPYAEGQRKRRNTIHEFKKSAKTTLIKIDPALKIKTKKVNTADQCANRCTRNKGLPFTCKAFVFDKARKQCLWFPFNSMSSGVKKEFGHEFDLYENKDYIRNCIIGKGRSYKGTVSITKSGIKCQPWSSMIPHEHSFLPSSYRGKDLQENYCRNPRGEEGGPWCFTSNPEVRYEVCDIPQCSEVECMTCNGESYRGLMDHTESGKICQRWDHQTPHRHKFLPERYPDKGFDDNYCRNPDGQPRPWCYTLDPHTRWEYCAIKTCADNTMNDTDVPLETTECIQGQGEGYRGTVNTIWNGIPCQRWDSQYPHEHDMTPENFKCKDLRENYCRNPDGSESPWCFTTDPNIRVGYCSQIPNCDMSHGQDCYRGNGKNYMGNLSQTRSGLTCSMWDKNMEDLHRHIFWEPDASKLNENYCRNPDDDAHGPWCYTGNPLIPWDYCPISRCEGDTTPTIVNLDHPVISCAKTKQLRVVNGIPTRTNIGWMVSLRYRNKHICGGSLIKESWVLTARQCFPSRDLKDYEAWLGIHDVHGRGDEKCKQVLNVSQLVYGPEGSDLVLMKLARPAVLDDFVSTIDLPNYGCTIPEKTSCSVYGWGYTGLINYDGLLRVAHLYIMGNEKCSQHHRGKVTLNESEICAGAEKIGSGPCEGDYGGPLVCEQHKMRMVLGVIVPGRGCAIPNRPGIFVRVAYYAKWIHKIILTYKVPQS

SEQ ID NO: 4409 - protein, 285 aa, Homo sapiens
MWVTKLLPALLLQHVLLHLLLLPIAIPYAEGQRKRRNTIHEFKKSAKTTLIKIDPALKIKTKKVNTADQCANRCTRNKGLPFTCKAFVFDKARKQCLWFPFNSMSSGVKKEFGHEFDLYENKDYIRNCIIGKGRSYKGTVSITKSGIKCQPWSSMIPHEHSYRGKDLQENYCRNPRGEEGGPWCFTSNPEVRYEVCDIPQCSEVECMTCNGESYRGLMDHTESGKICQRWDHQTPHRHKFLPERYPDKGFDDNYCRNPDGQPRPWCYTLDPHTRWEYCAIKTCET

SEQ ID NO: 4410 - protein, 410 aa, Homo sapiens
MAFLGLFSLLVLQSMATGATFPEEAIADLSVNMYNRLRATGEDENILFSPLSIALAMGMMELGAQGSTQKEIRHSMGYDSLKNGEEFSFLKEFSNMVTAKESQYVMKIANSLFVQNGFHVNEEFLQMMKKYFNAAVNHVDFSQNVAVANYINKWVENNTNNLVKDLVSPRDFDAATYLALINAVYFKGNWKSQFRPENTRTFSFTKDDESEVQIPMMYQQGEFYYGEFSDGSNEAGGIYQVLEIPYEGDEISMMLVLSRQEVPLATLEPLVKAQLVEEWANSVKKQKVEVYLPRFTVEQEIDLKDVLKALGITEIFIKDANLTGLSDNKEIFLSKAIHKSFLEVNEEGSEAAAVSGMIAISRMAVLYPQVIVDHPFFFLIRNRRTGTILFMGRVMHPETMNTSGHDFEEL

SEQ ID NO: 4411 - protein, 410 aa, Homo sapiens; identical to SEQ ID NO: 4410

SEQ ID NO: 4412 - protein, 211 aa, Homo sapiens
MQSAMFLAVQHDCRPMDKSAGSGHKSEEKREKMKRTLLKDWKTRLSYFLQNSSTPGKPKTGKKSKQQAFIKPSPEEAQLWSEAFDELLASKYGLAAFRAFLKSEFCEENIEFWLACEDFKKTKSPQKLSSKARKIYTDFIEKEAPKEINIDFQTKTLIAQNIQEATSGCFTTAQKRVYSLMENNSYPRFLESEFYQDLCKKPQITTEPHAT

SEQ ID NO: 4413 - protein, 97 aa, Homo sapiens
MLGNKRLGLSGLTLALSLLVCLGALAEAYPSKPDNPGEDAPAEDMARYYSALRHYINLITRQRYGKRSSPETLISDLLMRESTENVPRTRLEDPAMW

SEQ ID NO: 4414 - protein, 309 aa, Homo sapiens
MVGFKATDVPPTATVKFLGAGTAACIADLITFPLDTAKVRLQIQGESQGPVRATASAQYRGVMGTILTMVRTEGPRSLYNGLVAGLQRQMSFASVRIGLYDSVKQFYTKGSEHASIGSRLLAGSTTGALAVAVAQPTDVVKVRFQAQARAGGGRRYQSTVNAYKTIAREEGFRGLWKGTSPNVARNAIVNCAELVTYDLIKDALLKANLMTDDLPCHFTSAFGAGFCTTVIASPVDVVKTRYMNSALGQYSSAGHCALTMLQKEGPRAFYKGFMPSFLRLGSWNVVMFVTYEQLKRALMAACTSREAPF

SEQ ID NO: 4415 - protein, 116 aa, Homo sapiens
MLSCRLQCALAALSIVLALGCVTGAPSDPRLRQFLQKSLAAAAGKQELAKYFLAELLSEPNQTENDALEPEDLSQAAEQDEMRLELQRSANSNPAMAPRERKAGCKNFFWKTFTSC

SEQ ID NO: 4416 - protein, 502 aa, Homo sapiens
MSCPVPACCALLLVLGLCRARPRNALLLLADDGGFESGAYNNSAIATPHLDALARRSLLFRNAFTSVSSCSPSRASLLTGLPQHQNGMYGLHQDVHHFNSFDKVRSLPLLLSQAGVRTGIIGKKHVGPETVYPFDFAYTEENGSVLQVGRNITRIKLLVRKFLQTQDDRPFFLYVAFHDPHRCGHSQPQYGTFCEKFGNGESGMGRIPDWTPQAYDPLDVLVPYFVPNTPAARADLAAQYTTVGRMDQGVGLVLQELRDAGVLNDTLVIFTSDNGIPFPSGRTNLYWPGTAEPLLVSSPEHPKRWGQVSEAYVSLLDLTPTILDWFSIPYPSYAIFGSKTIHLTGRSLLPALEAEPLWATVFGSQSHHEVTMSYPMRSVQHRHFRLVHNLNFKMPFPIDQDFYVSPTFQDLLNRTTAGQPTGWYKDLRHYYYRARWELYDRSRDPHETQNLATDPRFAQLLEMLRDQLAKWQWETHDPWVCAPDGVLEEKLSPQCQPLHNEL

SEQ ID NO: 4417 - protein, 502 aa, Homo sapiens
MLAAMGSLAAALWAVVHPRTLLLGTVAFLLAADFLKRRRPKNYPPGPWRLPFLGNFFLVDFEQSHLEVQLFVKKYGNLFSLELGDISAVLITGLPLIKEALIHMDQNFGNRPVTPMREHIFKKNGLIMSSGQAWKEQRRFTLTALRNFGLGKKSLEERIQEEAQHLTEAIKEENGQPFDPHFKINNAVSNIICSITFGERFEYQDSWFQQLLKLLDEVTYLEASKTCQLYNVFPWIMKFLPGPHQTLFSNWKKLKLFVSHMIDKHRKDWNPAETRDFIDAYLKEMSKHTGNPTSSFHEENLICSTLDLFFAGTETTSTTLRWALLYMALYPEIQEKVQAEIDRVIGQGQQPSTAARESMPYTNAVIHEVQRMGNIIPLNVPREVTVDTTLAGYHLPKGTMILTNLTALHRDPTEWATPDTFNPDHFLENGQFKKREAFMPFSIGKRACLGEQLARTELFIFFTSLMQKFTFRPPNNEKLSLKFRMGITISPVSHRLCAVPQV

SEQ ID NO: 4418 - protein, 193 aa, Homo sapiens
MQSLMQAPLLIALGLLLAAPAQAHLKKPSQLSSFSWDNCDEGKDPAVIRSLTLEPDPIIVPGNVTLSVMGSTSVPLSSPLKVDLVLEKEVAGLWIKIPCTDYIGSCTFEHFCDVLDMLIPTGEPCPEPLRTYGLPCHCPFKEGTYSLPKSEFVVPDLELPSWLTTGNYRIESVLSSSGKRLGCIKIAASLKGI

SEQ ID NO: 4419 - protein, 186 aa, Homo sapiens
MQSLMQAPLLIALGLLLAAPAQAHLKKPSQLSSFSWDNCDEGKDPAVIRSLTLEPDPIIVPGNVTLSVMGSTSVPLSSPLKVDLVLEKEVAGLWIKIPCTDYIGSCTFEHFCDVLDMLIPTGEPCPEPLRTYGLPCHCPFSSVLCLPRPNSHSLPPFNPLSTVSPLPSLKIILYHLHFRLGQAALT

SEQ ID NO: 4420 - protein, 529 aa, Homo sapiens
MTSSRLWFSLLLAAAFAGRATALWPWPQNFQTSDQRYVLYPNNFQFQYDVSSAAQPGCSVLDEAFQRYRDLLFGSGSWPRPYLTGKRHTLEKNVLVVSVVTPGCNQLPTLESVENYTLTINDDQCLLLSETVWGALRGLETFSQLVWKSAEGTFFINKTEIEDFPRFPHRGLLLDTSRHYLPLSSILDTLDVMAYNKLNVFHWHLVDDPSFPYESFTFPELMRKGSYNPVTHIYTAQDVKEVIEYARLRGIRVLAEFDTPGHTLSWGPGIPGLLTPCYSGSEPSGTFGPVNPSLNNTYEFMSTFFLEVSSVFPDFYLHLGGDEVDFTCWKSNPEIQDFMRKKGFGEDFKQLESFYIQTLLDIVSSYGKGYVVWQEVFDNKVKIQPDTIIQVWREDIPVNYMKELELVTKAGFRALLSAPWYLNRISYGPDWKDFYIVEPLAFEGTPEQKALVIGGEACMWGEYVDNTNLVPRLWPRAGAVAERLWSNKLTSDLTFAYERLSHFRCELLRRGVQAQPLNVGFCEQEFEQT

SEQ ID NO: 4421 - protein, 223 aa, Homo sapiens [sequence omitted]

SEQ ID NO: 4422 - protein, 556 aa, Homo sapiens
MELCGLGLPRPPMLLALLLATLLAAMLALLTQVALVVQVAEAARAPSVSAKPGPALWPLPLSVKMTPNLLHLAPENFYISHSPNSTAGPSCTLLEEAFRRYHGYIFGFYKWHHEPAEFQAKTQVQQLLVSITLQSECDAFPNISSDESYTLLVKEPVAVLKANRVWGALRGLETFSQLVYQDSYGTFTINESTIIDSPRFSHRGILIDTSRHYLPVKIILKTLDAMAFNKFNVLHWHIVDDQSFPYQSITFPELSNKGSYSLSHVYTPNDVRMVIEYARLRGIRVLPEFDTPGHTLSWGKGQKDLLTPCYSRQNKLDSFGPINPTLNTTYSFLTTFFKEISEVFPDQFIHLGGDEVEFKCWESNPKIQDFMRQKGFGTDFKKLESFYIQKVLDIIATINKGSIVWQEVFDDKAKLAPGTIVEVWKDSAYPEELSRVTASGFPVILSAPWYLDLISYGQDWRKYYKVEPLDFGGTQKQKQLFIGGEACLWGEYVDATNLTPRLWPRASAVGERLWSSKDVRDMDDAYDRLTRHRCRMVERGIAAQPLYAGYCNHENM

SEQ ID NO: 4423 - protein, 581 aa, Homo sapiens
MAVRQALGRGLQLGRALLLRFTGKPGRAYGLGRPGPAAGCVRGERPGWAAGPGAEPRRVGLGLPNRLRFFRQSVAGLAARLQRQFVVRAWGCAGPCGRAVFLAFGLGLGLIEEKQAESRRAVSACQEIQAIFTQKSKPGPDPLDTRRLQGFRLEEYLIGQSIGKGCSAAVYEATMPTLPQNLEVTKSTGLLPGRGPGTSAPGEGQERAPGAPAFPLAIKMMWNISAGSSSEAILNTMSQELVPASRVALAGEYGAVTYRKSKRGPKQLAPHPNIIRVLRAFTSSVPLLPGALVDYPDVLPSRLHPEGLGHGRTLFLVMKNYPCTLRQYLCVNTPSPRLAAMMLLQLLEGVDHLVQQGIAHRDLKSDNILVELDPDGCPWLVIADFGCCLADESIGLQLPFSSWYVDRGGNGCLMAPEVSTARPGPRAVIDYSKADAWAVGAIAYEIFGLVNPFYGQGKAHLESRSYQEAQLPALPESVPPDVRQLVRALLQREASKRPSARVAANVLHLSLWGEHILALKNLKLDKMVGWLLQQSAATLLANRLTEKCCVETKMKMLFLANLECETLCQAALLLCSWRAAL

SEQ ID NO: 4424 - protein, 256 aa, Homo sapiens
MAAAVGRLLRASVARHVSAIPWGISATAALRPAACGRTSLTNLLCSGSSQAKLFSTSSSCHAPAVTQHAPYFKGTAVVNGEFKDLSLDDFKGKYLVLFFYPLDFTFVCPTEIVAFSDKANEFHDVNCEVVAVSVDSHFSHLAWINTPRKNGGLGHMNIALLSDLTKQISRDYGVLLEGSGLALRGLFIIDPNGVIKHLSVNDLPVGRSVEETLRLVKAFQYVETHGEVCPANWTPDSPTIKPSPAASKEYFQKVNQ

SEQ ID NO: 4425 - protein, 199 aa, Homo sapiens
MSSGNAKIGHPAPNFKATAVMPDGQFKDISLSDYKGKYVVFFFYPLDFTFVCPTEIIAFSDRAEEFKKLNCQVIGASVDSHFCHLAWVNTPKKQGGLGPMNIPLVSDPKRTIAQDYGVLKADEGISFRGLFIIDDKGILRQITVNDLPVGRSVDETLRLVQAFQFTDKHGEVCPAGWKPGSDTIKPDVQKSKEYFSKQK

SEQ ID NO: 4426 - protein, 199 aa, Homo sapiens; identical to SEQ ID NO: 4425

SEQ ID NO: 4427 - protein, 199 aa, Homo sapiens; identical to SEQ ID NO: 4425

SEQ ID NO: 4428 - protein, 546 aa, Homo sapiens
MPGFLVRILPLLLVLLLLGPTRGLRNATQRMFEIDYSRDSFLKDGQPFRYISGSIHYSRVPRFYWKDRLLKMKMAGLNAIQTLPGSCGQVVGSPSAQDEASPLSEWRASYNSAGSNITDAFLSQRKCEPKGPLINSEFYTGWLDHWGQPHSTIKTEAVASSLYDILARGASVNLYMFIGGTNFAYWNGANSPYAAQPTSYDYDAPLSEAGDLTEKYFALRNIIQKFEKVPEGPIPPSTPKFAYGKVTLEKLKTVGAALDILCPSGPIKSLYPLTFIQVKQHYGFVLYRTTLPQDCSNPAPLSSPLNGVHDRAYVAVDGIPQGVLERNNVITLNITGKAGATLDLLVENMGRVNYGAYINDFKGLVSNLTLSSNILTDWTIFPLDTEDAVRSHLGGWGHRDSGHHDEAWAHNSSNYTLPAFYMGNFSIPSGIPDLPQDTFIQFPGWTKGQVWINGFNLGRYWPARGPQLTLFVPQHILMTSAPNTITVLELEWAPCSSDDPELCAVTFVDRPVIGSSVTYDHPSKPVEKRLMPPPPQKNKDSWLDHV

SEQ ID NO: 4429 - protein, 647 aa, Homo sapiens
MFEIDYSRDSFLKDGQPFRYISGSIHYSRVPRFYWKDRLLKMKMAGLNAIQTYVPWNFHEPWPGQYQFSEDHDVEYFLRLAHELGLLVILRPGPYICAEWEMGGLPAWLLEKESILLRSSDPDYLAAVDKWLGVLLPKMKPLLYQNGGPVITVQVENEYGSYFACDFDYLRFLQKRFRHHLGDDVVLFTTDGAHKTFLKCGALQGLYTTVDFGTGSNITDAFLSQRKCEPKGPLINSEFYTGWLDHWGQPHSTIKTEAVASSLYDILARGASVNLYMFIGGTNFAYWNGANSPYAAQPTSYDYDAPLSEAGDLTEKYFALRNIIQKFEKVPEGPIPPSTPKFAYGKVTLEKLKTVGAALDILCPSGPIKSLYPLTFIQVKQHYGFVLYRTTLPQDCSNPAPLSSPLNGVHDRAYVAVDGIPQGVLERNNVITLNITGKAGATLDLLVENMGRVNYGAYINDFKGLVSNLTLSSNILTDWTIFPLDTEDAVRSHLGGWGHRDSGHHDEAWAHNSSNYTLPAFYMGNFSIPSGIPDLPQDTFIQFPGWTKGQVWINGFNLGRYWPARGPQLTLFVPQHILMTSAPNTITVLELEWAPCSSDDPELCAVTFVDRPVIGSSVTYDHPSKPVEKRLMPPPPQKNKDSWLDHV

SEQ ID NO: 4430 - protein, 677 aa, Homo sapiens
MPGFLVRILPLLLVLLLLGPTRGLRNATQRMFEIDYSRDSFLKDGQPFRYISGSIHYSRVPRFYWKDRLLKMKMAGLNAIQTYVPWNFHEPWPGQYQFSEDHDVEYFLRLAHELGLLVILRPGPYICAEWEMGGLPAWLLEKESILLRSSDPDYLAAVDKWLGVLLPKMKPLLYQNGGPVITVQVENEYGSYFACDFDYLRFLQKRFRHHLGDDVVLFTTDGAHKTFLKCGALQGLYTTVDFGTGSNITDAFLSQRKCEPKGPLINSEFYTGWLDHWGQPHSTIKTEAVASSLYDILARGASVNLYMFIGGTNFAYWNGANSPYAAQPTSYDYDAPLSEAGDLTEKYFALRNIIQKFEKVPEGPIPPSTPKFAYGKVTLEKLKTVGAALDILCPSGPIKSLYPLTFIQVKQHYGFVLYRTTLPQDCSNPAPLSSPLNGVHDRAYVAVDGIPQGVLERNNVITLNITGKAGATLDLLVENMGRVNYGAYINDFKGLVSNLTLSSNILTDWTIFPLDTEDAVRSHLGGWGHRDSGHHDEAWAHNSSNYTLPAFYMGNFSIPSGIPDLPQDTFIQFPGWTKGQVWINGFNLGRYWPARGPQLTLFVPQHILMTSAPNTITVLELEWAPCSSDDPELCAVTFVDRPVIGSSVTYDHPSKPVEKRLMPPPPQKNKDSWLDHV

SEQ ID NO: 4431 - protein, 563 aa, Homo sapiens
MGLQACLLGLFALILSGKCSYSPEPDQRRTLPPGWVSLGRADPEEELSLTFALRQQNVERLSELVQAVSDPSSPQYGKYLTLENVADLVRPSPLTLHTVQKWLLAAGAQKCHSVITQDFLTCWLSIRQAELLLPGAEFHHYVGGPTETHVVRSPHPYQLPQALAPHVDFVGGLHRFPPTSSLRQRPEPQVTGTVGLHLGVTPSVIRKRYNLTSQDVGSGTSNNSQACAQFLEQYFHDSDLAQFMRLFGGNFAHQASVARVVGQQGRGRAGIEASLDVQYLMSAGANISTWVYSSPGRHEGQEPFLQWLMLLSNESALPHVHTVSYGDDEDSLSSAYIQRVNTELMKAAARGLTLLFASGDSGAGCWSVSGRHQFRPTFPASSPYVTTVGGTSFQEPFLITNEIVDYISGGGFSNVFPRPSYQEEAVTKFLSSSPHLPPSSYFNASGRAYPDVAALSDGYWVVSNRVPIPWVSGTSASTPVFGGILSLINEHRILSGRPPLGFLNPRLYQQHGAGLFDVTRGCHESCLDEEVEGQGFCSGPGWDPVTGWGTPNFPALLKTLLNP

SEQ ID NO: 4432 - protein, 147 aa, Homo sapiens
MVMGLGVLLLVFVLGLGLTPPTLAQDNSRYTHFLTQHYDAKPQGRDDRYCESIMRRRGLTSPCKDINTFIHGNKRSIKAICENKNGNPHRENLRISKSSFQVTTCKLHGGSPWPPCQYRATAGFRNVVVACENGLPVHLDQSIFRRP

SEQ ID NO: 4433 - protein, 147 aa, Homo sapiens; identical to SEQ ID NO: 4432

SEQ ID NO: 4434 - protein, 288 aa, Homo sapiens
MERPQPDSMPQDLSEALKEATKEVHTQAENAEFMRNFQKGQVTRDGFKLVMASLYHIYVALEEEIERNKESPVFAPVYFPEELHRKAALEQDLAFWYGPRWQEVIPYTPAMQRYVKRLHEVGRTEPELLVAHAYTRYLGDLSGGQVLKKIAQKALDLPSSGEGLAFFTFPNIASATKFKQLYRSRMNSLEMTPAVRQRVIEEAKTAFLLNIQLFEELQELLTHDTKDQSPSRAPGLRQRASNKVQDSAPVETPRGKPPLNTRSQAPLLRWVLTLSFLVATVAVGLYAM

SEQ ID NO: 4435 - protein, 640 aa, Homo sapiens
MSERKEGRGKGKGKKKERGSGKKPESAAGSQSPALPPRLKEMKSQESAAGSKLVLRCETSSEYSSLRFKWFKNGNELNRKNKPQNIKIQKKPGKSELRINKASLADSGEYMCKVISKLGNDSASANITIVESNEIITGMPASTEGAYVSSESPIRISVSTEGANTSSSTSTSTTGTSHLVKCAEKEKTFCVNGGECFMVKDLSNPSRYLCKCQPGFTGARCTENVPMKVQNQEKAEELYQKRVLTITGICIALLVVGIMCVVAYCKTKKQRKKLHDRLRQSLRSERNNMMNIANGPHHPNPPPENVQLVNQYVSKNVISSEHIVEREAETSFSTSHYTSTAHHSTTVTQTPSHSWSNGHTESILSESHSVIVMSSVENSRHSSPTGGPRGRLNGTGGPRECNSFLRHARETPDSYRDSPHSERYVSAMTTPARMSPVDFHTPSSPKSPPSEMSPPVSSMTVSMPSMAVSPFMEEERPLLLVTPPRLREKKFDHHPQQFSSFHHNPAHDSNSLPASPLRIVEDEEYETTQEYEPAQEPVKKLANSRRAKRTKPNGHIANRLEVDSNTSSQSSNSESETEDERVGEDTPFLGIQNPLAASLEATPAFRLADSRTNPAGRFSTQEEIQARLSSVIANQDPIAV

SEQ ID NO: 4436 - protein, 177 aa, Homo sapiens
MSERKEGRGKGKGKKKERGSGKKPESAAGSQSPALPPRLKEMKSQESAAGSKLVLRCETSSEYSSLRFKWFKNGNELNRKNKPQNIKIQKKPGKSELRINKASLADSGEYMCKVISKLGNDSASANITIVESNATSTSTTGTSHLVKCAEKEKTFCVNGGECFMVKDLSNPSRYLCK

SEQ ID NO: 4437 - protein, 459 aa, Homo sapiens
MSERKEGRGKGKGKKKERGSGKKPESAAGSQSPALPPRLKEMKSQESAAGSKLVLRCETSSEYSSLRFKWFKNGNELNRKNKPQNIKIQKKPGKSELRINKASLADSGEYMCKVISKLGNDSASANITIVESNEIITGMPASTEGAYVSSESPIRISVSTEGANTSSSTSTSTTGTSHLVKCAEKEKTFCVNGGECFMVKDLSNPSRYLCKCPNEFTGDRCQNYVMASFYKAEELYQKRVLTITGICIALLVVGIMCVVAYCKTKKQRKKLHDRLRQSLRSERNNMMNIANGPHHPNPPPENVQLVNQYVSKNVISSEHIVEREAETSFSTSHYTSTAHHSTTVTQTPSHSWSNGHTESILSESHSVIVMSSVENSRHSSPTGGPRGRLNGTGGPRECNSFLRHARETPDSYRDSPHSERHNLIAELRRNKAHRSKCMQIQLSATHLRSSSIPHLGFIL

SEQ ID NO: 4438 - protein, 207 aa, Homo sapiens
MSERKEGRGKGKGKKKERGSGKKPESAAGSQSPALPPRLKEMKSQESAAGSKLVLRCETSSEYSSLRFKWFKNGNELNRKNKPQNIKIQKKPGKSELRINKASLADSGEYMCKVISKLGNDSASANITIVESNATSTSTTGTSHLVKCAEKEKTFCVNGGECFMVKDLSNPSRYLCKCPNEFTGDRCQNYVMASFYSTSTPFLSLPE

SEQ ID NO: 4439 - protein, 462 aa, Homo sapiens
MSERKEGRGKGKGKKKERGSGKKPESAAGSQSPALPPRLKEMKSQESAAGSKLVLRCETSSEYSSLRFKWFKNGNELNRKNKPQNIKIQKKPGKSELRINKASLADSGEYMCKVISKLGNDSASANITIVESNEIITGMPASTEGAYVSSESPIRISVSTEGANTSSSTSTSTTGTSHLVKCAEKEKTFCVNGGECFMVKDLSNPSRYLCKCQPGFTGARCTENVPMKVQNQEKAEELYQKRVLTITGICIALLVVGIMCVVAYCKTKKQRKKLHDRLRQSLRSERNNMMNIANGPHHPNPPPENVQLVNQYVSKNVISSEHIVEREAETSFSTSHYTSTAHHSTTVTQTPSHSWSNGHTESILSESHSVIVMSSVENSRHSSPTGGPRGRLNGTGGPRECNSFLRHARETPDSYRDSPHSERHNLIAELRRNKAHRSKCMQIQLSATHLRSSSIPHLGFIL

SEQ ID NO: 4440 - protein, 422 aa, Homo sapiens
MRWRRAPRRSGRPGPRAQRPGSAARSSPPLPLLPLLLLLGTAALAPGAAAGNEAAPAGASVCYSSPPSVGSVQELAQRAAVVIEGKVHPQRRQQGALDRKAAAAAGEAGAWGGDREPPAAGPRALGPPAEEPLLAANGTVPSWPTAPVPSAGEPGEEAPYLVKVHQVWAVKAGGLKKDSLLTVRLGTWGHPAFPSCGRLKEDSRYIFFMEPDANSTSRAPAAFRASFPPLETGRNLKKEVSRVLCKRCALPPRLKEMKSQESAAGSKLVLRCETSSEYSSLRFKWFKNGNELNRKNKPQNIKIQKKPGKSELRINKASLADSGEYMCKVISKLGNDSASANITIVESNATSTSTTGTSHLVKCAEKEKTFCVNGGECFMVKDLSNPSRYLCKCPNEFTGDRCQNYVMASFYSTSTPFLSLPE

SEQ ID NO: 4441 - protein, 607 aa, Homo sapiens
MGKGRAGRVGTTALPPRLKEMKSQESAAGSKLVLRCETSSEYSSLRFKWFKNGNELNRKNKPQNIKIQKKPGKSELRINKASLADSGEYMCKVISKLGNDSASANITIVESNEIITGMPASTEGAYVSSATSTSTTGTSHLVKCAEKEKTFCVNGGECFMVKDLSNPSRYLCKCPNEFTGDRCQNYVMASFYKHLGIEFMEAEELYQKRVLTITGICIALLVVGIMCVVAYCKTKKQRKKLHDRLRQSLRSERNNMMNIANGPHHPNPPPENVQLVNQYVSKNVISSEHIVEREAETSFSTSHYTSTAHHSTTVTQTPSHSWSNGHTESILSESHSVIVMSSVENSRHSSPTGGPRGRLNGTGGPRECNSFLRHARETPDSYRDSPHSERYVSAMTTPARMSPVDFHTPSSPKSPPSEMSPPVSSMTVSMPSMAVSPFMEEERPLLLVTPPRLREKKFDHHPQQFSSFHHNPAHDSNSLPASPLRIVEDEEYETTQEYEPAQEPVKKLANSRRAKRTKPNGHIANRLEVDSNTSSQSSNSESETEDERVGEDTPFLGIQNPLAASLEATPAFRLADSRTNPAGRFSTQEEIQARLSSVIANQDPIAV

SEQ ID NO: 4442 - protein, 308 aa, Homo sapiens
MQIPKHISIEDITATSTSTTGTSHLVKCAEKEKTFCVNGGECFMVKDLSNPSRYLCKCQPGFTGARCTENVPMKVQNQEKAEELYQKRVLTITGICIALLVVGIMCVVAYCKTKKQRKKLHDRLRQSLRSERNNMMNIANGPHHPNPPPENVQLVNQYVSKNVISSEHIVEREAETSFSTSHYTSTAHHSTTVTQTPSHSWSNGHTESILSESHSVIVMSSVENSRHSSPTGGPRGRLNGTGGPRECNSFLRHARETPDSYRDSPHSERHNLIAELRRNKAHRSKCMQIQLSATHLRSSSIPHLGFIL

SEQ ID NO: 4443 - protein, 645 aa, Homo sapiens
MSERKEGRGKGKGKKKERGSGKKPESAAGSQSPALPPRLKEMKSQESAAGSKLVLRCETSSEYSSLRFKWFKNGNELNRKNKPQNIKIQKKPGKSELRINKASLADSGEYMCKVISKLGNDSASANITIVESNEIITGMPASTEGAYVSSESPIRISVSTEGANTSSSTSTSTTGTSHLVKCAEKEKTFCVNGGECFMVKDLSNPSRYLCKCPNEFTGDRCQNYVMASFYKHLGIEFMEAEELYQKRVLTITGICIALLVVGIMCVVAYCKTKKQRKKLHDRLRQSLRSERNNMMNIANGPHHPNPPPENVQLVNQYVSKNVISSEHIVEREAETSFSTSHYTSTAHHSTTVTQTPSHSWSNGHTESILSESHSVIVMSSVENSRHSSPTGGPRGRLNGTGGPRECNSFLRHARETPDSYRDSPHSERYVSAMTTPARMSPVDFHTPSSPKSPPSEMSPPVSSMTVSMPSMAVSPFMEEERPLLLVTPPRLREKKFDHHPQQFSSFHHNPAHDSNSLPASPLRIVEDEEYETTQEYEPAQEPVKKLANSRRAKRTKPNGHIANRLEVDSNTSSQSSNSESETEDERVGEDTPFLGIQNPLAASLEATPAFRLADSRTNPAGRFSTQEEIQARLSSVIANQDPIAV

SEQ ID NO: 4444 - protein, 624 aa, Homo sapiens
MGKGRAGRVGTTALPPRLKEMKSQESAAGSKLVLRCETSSEYSSLRFKWFKNGNELNRKNKPQNIKIQKKPGKSELRINKASLADSGEYMCKVISKLGNDSASANITIVESNEIITGMPASTEGAYVSSESPIRISVSTEGANTSSSTSTSTTGTSHLVKCAEKEKTFCVNGGECFMVKDLSNPSRYLCKCPNEFTGDRCQNYVMASFYKHLGIEFMEAEELYQKRVLTITGICIALLVVGIMCVVAYCKTKKQRKKLHDRLRQSLRSERNNMMNIANGPHHPNPPPENVQLVNQYVSKNVISSEHIVEREAETSFSTSHYTSTAHHSTTVTQTPSHSWSNGHTESILSESHSVIVMSSVENSRHSSPTGGPRGRLNGTGGPRECNSFLRHARETPDSYRDSPHSERYVSAMTTPARMSPVDFHTPSSPKSPPSEMSPPVSSMTVSMPSMAVSPFMEEERPLLLVTPPRLREKKFDHHPQQFSSFHHNPAHDSNSLPASPLRIVEDEEYETTQEYEPAQEPVKKLANSRRAKRTKPNGHIANRLEVDSNTSSQSSNSESETEDERVGEDTPFLGIQNPLAASLEATPAFRLADSRTNPAGRFSTQEEIQARLSSVIANQDPIAV

SEQ ID NO: 4445 - protein, 420 aa, Homo sapiens
MSERKEGRGKGKGKKKERGSGKKPESAAGSQSPALPPRLKEMKSQESAAGSKLVLRCETSSEYSSLRFKWFKNGNELNRKNKPQNIKIQKKPGKSELRINKASLADSGEYMCKVISKLGNDSASANITIVESNEIITGMPASTEGAYVSSESPIRISVSTEGANTSSSTSTSTTGTSHLVKCAEKEKTFCVNGGECFMVKDLSNPSRYLCKCPNEFTGDRCQNYVMASFYKAEELYQKRVLTITGICIALLVVGIMCVVAYCKTKKQRKKLHDRLRQSLRSERNNMMNIANGPHHPNPPPENVQLVNQYVSKNVISSEHIVEREAETSFSTSHYTSTAHHSTTVTQTPSHSWSNGHTESILSESHSVIVMSSVENSRHSSPTGGPRGRLNGTGGPRECNSFLRHARETPDSYRDSPHSER

SEQ ID NO: 4446 - protein, 637 aa, Homo sapiens
MSERKEGRGKGKGKKKERGSGKKPESAAGSQSPALPPRLKEMKSQESAAGSKLVLRCETSSEYSSLRFKWFKNGNELNRKNKPQNIKIQKKPGKSELRINKASLADSGEYMCKVISKLGNDSASANITIVESNEIITGMPASTEGAYVSSESPIRISVSTEGANTSSSTSTSTTGTSHLVKCAEKEKTFCVNGGECFMVKDLSNPSRYLCKCPNEFTGDRCQNYVMASFYKAEELYQKRVLTITGICIALLVVGIMCVVAYCKTKKQRKKLHDRLRQSLRSERNNMMNIANGPHHPNPPPENVQLVNQYVSKNVISSEHIVEREAETSFSTSHYTSTAHHSTTVTQTPSHSWSNGHTESILSESHSVIVMSSVENSRHSSPTGGPRGRLNGTGGPRECNSFLRHARETPDSYRDSPHSERYVSAMTTPARMSPVDFHTPSSPKSPPSEMSPPVSSMTVSMPSMAVSPFMEEERPLLLVTPPRLREKKFDHHPQQFSSFHHNPAHDSNSLPASPLRIVEDEEYETTQEYEPAQEPVKKLANSRRAKRTKPNGHIANRLEVDSNTSSQSSNSESETEDERVGEDTPFLGIQNPLAASLEATPAFRLADSRTNPAGRFSTQEEIQARLSSVIANQDPIAV

SEQ ID NO: 4447 - protein, 241 aa, Homo sapiens
MSERKEGRGKGKGKKKERGSGKKPESAAGSQSPALPPRLKEMKSQESAAGSKLVLRCETSSEYSSLRFKWFKNGNELNRKNKPQNIKIQKKPGKSELRINKASLADSGEYMCKVISKLGNDSASANITIVESNEIITGMPASTEGAYVSSESPIRISVSTEGANTSSSTSTSTTGTSHLVKCAEKEKTFCVNGGECFMVKDLSNPSRYLCKCPNEFTGDRCQNYVMASFYSTSTPFLSLPE

SEQ ID NO: 4448 - protein, 296 aa, Homo sapiens
MEIYSPDMSEVAAERSSSPSTQLSADPSLDGLPAAEDMPEPQTEDGRTPGLVGLAVPCCACLEAERLRGCLNSEKICIVPILACLVSLCLCIAGLKWVFVDKIFEYDSPTHLDPGGLGQDPIISLDATAASAVWVSSEAYTSPVSRAQSESEVQVTVQGDKAVVSFEPSAAPTPKNRIFAFSFLPSTAPSFPSPTRNPEVRTPKSATQPQTTETNLQTAPKLSTSTSTTGTSHLVKCAEKEKTFCVNGGECFMVKDLSNPSRYLCKCPNEFTGDRCQNYVMASFYSTSTPFLSLPE

SEQ ID NO: 4449 - protein, 194 aa, Homo sapiens
MSERKEGRGKGKGKKKERGSGKKPESAAGSQSPALPPRLKEMKSQESAAGSKLVLRCETSSEYSSLRFKWFKNGNELNRKNKPQNIKIQKKPGKSELRINKASLADSGEYMCKVISKLGNDSASANITIVESNEIITGMPASTEGAYVSSATSTSTTGTSHLVKCAEKEKTFCVNGGECFMVKDLSNPSRYLCK

SEQ ID NO: 4450 - protein, 211 aa, Homo sapiens
MSERKEGRGKGKGKKKERGSGKKPESAAGSQSPALPPRLKEMKSQESAAGSKLVLRCETSSEYSSLRFKWFKNGNELNRKNKPQNIKIQKKPGKSELRINKASLADSGEYMCKVISKLGNDSASANITIVESNEIITGMPASTEGAYVSSESPIRISVSTEGANTSSSTSTSTTGTSHLVKCAEKEKTFCVNGGECFMVKDLSNPSRYLCK

SEQ ID NO: 4451 - protein, 590 aa, Homo sapiens
MGKGRAGRVGTTALPPRLKEMKSQESAAGSKLVLRCETSSEYSSLRFKWFKNGNELNRKNKPQNIKIQKKPGKSELRINKASLADSGEYMCKVISKLGNDSASANITIVESNATSTSTTGTSHLVKCAEKEKTFCVNGGECFMVKDLSNPSRYLCKCPNEFTGDRCQNYVMASFYKHLGIEFMEAEELYQKRVLTITGICIALLVVGIMCVVAYCKTKKQRKKLHDRLRQSLRSERNNMMNIANGPHHPNPPPENVQLVNQYVSKNVISSEHIVEREAETSFSTSHYTSTAHHSTTVTQTPSHSWSNGHTESILSESHSVIVMSSVENSRHSSPTGGPRGRLNGTGGPRECNSFLRHARETPDSYRDSPHSERYVSAMTTPARMSPVDFHTPSSPKSPPSEMSPPVSSMTVSMPSMAVSPFMEEERPLLLVTPPRLREKKFDHHPQQFSSFHHNPAHDSNSLPASPLRIVEDEEYETTQEYEPAQEPVKKLANSRRAKRTKPNGHIANRLEVDSNTSSQSSNSESETEDERVGEDTPFLGIQNPLAASLEATPAFRLADSRTNPAGRFSTQEEIQARLSSVIANQDPIAV

SEQ ID NO: 4452 - protein, 462 aa, Homo sapiens
MQLRKMQTVKKEQASLDASSNVDKMMVLNSALTEVSEDSTTGEELLLSEGSVGKNKSSACRRKREFIPDEKKDAMYWEKRRKNNEAAKRSREKRRLNDLVLENKLIALGEENATLKAELLSLKLKFGLISSTAYAQEIQKLSNSTAVYFQDYQTSKSNVSSFVDEHEPSMVSSSCISVIKHSPQSSLSDVSEVSSVEHTQESSVQGSCRSPENKFQIIKQEPMELESYTREPRDDRGSYTASIYQNYMGNSFSGYSHSPPLLQVNRSSSNSPRTSETDDGVVGKSSDGEDEQQVPKGPIHSPVELKHVHATVVKVPEVNSSALPHKLRIKAKAMQIKVEAFDNEFEATQKLSSPIDMTSKRHFELEKHSAPSMVHSSLTPFSVQVTNIQDWSLKSEHWHQKELSGKTQNSFKTGVVEMKDSGYKVSDPENLYLKQGIANLSAEVVSLKRLIATQPISASDSG

SEQ ID NO: 4453 - protein, 1011 aa, Homo sapiens
MGAYARASGVCARGCLDSAGPWTMSRALRPPLPPLCFFLLLLAAAGARAGGYETCPTVQPNMLNVHLLPHTHDDVGWLKTVDQYFYGIKNDIQHAGVQYILDSVISALLADPTRRFIYVEIAFFSRWWHQQTNATQEVVRDLVRQGRLEFANGGWVMNDEAATHYGAIVDQMTLGLRFLEDTFGNDGRPRVAWHIDPFGHSREQASLFAQMGFDGFFFGRLDYQDKWVRMQKLEMEQVWRASTSLKPPTADLFTGVLPNGYNPPRNLCWDVLCVDQPLVEDPRSPEYNAKELVDYFLNVATAQGRYYRTNHTVMTMGSDFQYENANMWFKNLDKLIRLVNAQQAKGSSVHVLYSTPACYLWELNKANLTWSVKHDDFFPYADGPHQFWTGYFSSRPALKRYERLSYNFLQVCNQLEALVGLAANVGPYGSGDSAPLNEAMAVLQHHDAVSGTSRQHVANDYARQLAAGWGPCEVLLSNALARLRGFKDHFTFCQQLNISICPLSQTAARFQVIVYNPLGRKVNWMVRLPVSEGVFVVKDPNGRTVPSDVVIFPSSDSQAHPPELLFSASLPALGFSTYSVAQVPRWKPQARAPQPIPRRSWSPALTIENEHIRATFDPDTGLLMEIMNMNQQLLLPVRQTFFWYNASIGDNESDQASGAYIFRPNQQKPLPVSRWAQIHLVKTPLVQEVHQNFSAWCSQVVRLYPGQRHLELEWSVGPIPVGDTWGKEVISRFDTPLETKGRFYTDSNGREILERRRDYRPTWKLNQTEPVAGNYYPVNTRIYITDGNMQLTVLTDRSQGGSSLRDGSLELMVHRRLLKDDGRGVSEPLMENGSGAWVRGRHLVLLDTAQAAAAGHRLLAEQEVLAPQVVLAPGGGAAYNLGAPPRTQFSGLRRDLPPSVHLLTLASWGPEMVLLRLEHQFAVGEDSGRNLSAPVTLNLRDLFSTFTITRLQETTLVANQLREAASRLKWTTNTGPTPHQTPYQLDPANITLEPMEIRTFLASVQWKEVDG

SEQ ID NO: 4454 - protein, 516 aa, Homo sapiens
MEPAVSLAVCALLFLLWVRLKGLEFVLIHQRWVFVCLFLLPLSLIFDIYYYVRAWVVFKLSSAPRLHEQRVRDIQKQVREWKEQGSKTFMCTGRPGWLTVSLRVGKYKKTHKNIMINLMDILEVDTKKQIVRVEPLVTMGQVTALLTSIGWTLPVLPELDDLTVGGLIMGTGIESSSHKYGLFQHICTAYELVLADGSFVRCTPSENSDLFYAVPWSCGTLGFLVAAEIRIIPAKKYVKLRFEPVRGLEAICAKFTHESQRQENHFVEGLLYSLDEAVIMTGVMTDEAEPSKLNSIGNYYKPWFFKHVENYLKTNREGLEYIPLRHYYHRHTRSIFWELQDIIPFGNNPIFRYLFGWMVPPKISLLKLTQGETLRKLYEQHHVVQDMLVPMKCLQQALHTFQNDIHVYPIWLCPFILPSQPGLVHPKGNEAELYIDIGAYGEPRVKHFEARSCMRQLEKFVRSVHGFQMLYADCYMNREEFWEMFDGSLYHKLREKLGCQDAFPEVYDKICKAARH

SEQ ID NO: 4455 - protein, 480 aa, Homo sapiens
MNASEFRRRGKEMVDYVANYMEGIEGRQVYPDVEPGYLRPLIPAAAPQEPDTFEDIINDVEKIIMPGVTHWHSPYFFAYFPTASSYPAMLADMLCGAIGCIGFSWAASPACTELETVMMDWLGKMLELPKAFLNEKAGEGGGVIQGSASEATLVALLAARTKVIHRLQAASPELTQAAIMEKLVAYSSDQAHSSVERAGLIGGVKLKAIPSDGNFAMRASALQEALERDKAAGLIPFFMVATLGTTTCCSFDNLLEVGPICNKEDIWLHVDAAYAGSAFICPEFRHLLNGVEFADSFNFNPHKWLLVNFDCSAMWVKKRTDLTGAFRLDPTYLKHSHQDSGLITDYRHWQIPLGRRFRSLKMWFVFRMYGVKGLQAYIRKHVQLSHEFESLVRQDPRFEICVEVILGLVCFRLKGSNKVNEALLQRINSAKKIHLVPCHLRDKFVLRFAICSRTVESAHVQRAWEHIKELAADVLRAERE

SEQ ID NO: 4456 - protein, 480 aa, Homo sapiens; identical to SEQ ID NO: 4455

SEQ ID NO: 4457 - protein, 209 aa, Homo sapiens
MFCQLAKTCPVQLWVDSTPPPGTRVRAMAIYKQSQHMTEVVRRCPHHERCSDSDGLAPPQHLIRVEGNLRVEYLDDRNTFRHSVVVPYEPPEVGSDCTTIHYNYMCNSSCMGGMNRRPILTIITLEDSSGNLLGRNSFEVRVCACPGRDRRTEEENLRKKGEPHHELPPGSTKRALPNNTSSSPQPKKKPLDGEYFTLQDQTSFQKENC

SEQ ID NO: 4458 - protein, 214 aa, Homo sapiens
MFCQLAKTCPVQLWVDSTPPPGTRVRAMAIYKQSQHMTEVVRRCPHHERCSDSDGLAPPQHLIRVEGNLRVEYLDDRNTFRHSVVVPYEPPEVGSDCTTIHYNYMCNSSCMGGMNRRPILTIITLEDSSGNLLGRNSFEVRVCACPGRDRRTEEENLRKKGEPHHELPPGSTKRALPNNTSSSPQPKKKPLDGEYFTLQMLLDLRWCYFLINSS

SEQ ID NO: 4459 - protein, 346 aa, Homo sapiens
MEEPQSDPSVEPPLSQETFSDLWKLLPENNVLSPLPSQAMDDLMLSPDDIEQWFTEDPGPDEAPRMPEAAPPVAPAPAAPTPAAPAPAPSWPLSSSVPSQKTYQGSYGFRLGFLHSGTAKSVTCTYSPALNKMFCQLAKTCPVQLWVDSTPPPGTRVRAMAIYKQSQHMTEVVRRCPHHERCSDSDGLAPPQHLIRVEGNLRVEYLDDRNTFRHSVVVPYEPPEVGSDCTTIHYNYMCNSSCMGGMNRRPILTIITLEDSSGNLLGRNSFEVRVCACPGRDRRTEEENLRKKGEPHHELPPGSTKRALPNNTSSSPQPKKKPLDGEYFTLQMLLDLRWCYFLINSS

SEQ ID NO: 4460 - protein, 393 aa, Homo sapiens [sequence omitted]

SEQ ID NO: 4461 - protein, 261 aa, Homo sapiens
MFCQLAKTCPVQLWVDSTPPPGTRVRAMAIYKQSQHMTEVVRRCPHHERCSDSDGLAPPQHLIRVEGNLRVEYLDDRNTFRHSVVVPYEPPEVGSDCTTIHYNYMCNSSCMGGMNRRPILTIITLEDSSGNLLGRNSFEVRVCACPGRDRRTEEENLRKKGEPHHELPPGSTKRALPNNTSSSPQPKKKPLDGEYFTLQIRGRERFEMFRELNEALELKDAQAGKEPGGSRAHSSHLKSKKGQSTSRHKKLMFKTEGPDSD

SEQ ID NO: 4462 - protein, 341 aa, Homo sapiens
MEEPQSDPSVEPPLSQETFSDLWKLLPENNVLSPLPSQAMDDLMLSPDDIEQWFTEDPGPDEAPRMPEAAPPVAPAPAAPTPAAPAPAPSWPLSSSVPSQKTYQGSYGFRLGFLHSGTAKSVTCTYSPALNKMFCQLAKTCPVQLWVDSTPPPGTRVRAMAIYKQSQHMTEVVRRCPHHERCSDSDGLAPPQHLIRVEGNLRVEYLDDRNTFRHSVVVPYEPPEVGSDCTTIHYNYMCNSSCMGGMNRRPILTIITLEDSSGNLLGRNSFEVRVCACPGRDRRTEEENLRKKGEPHHELPPGSTKRALPNNTSSSPQPKKKPLDGEYFTLQDQTSFQKENC

SEQ ID NO: 4463 - protein, 393 aa, Homo sapiens [sequence omitted]

SEQ ID NO: 4464 - protein, 1102 aa, Homo sapiens
MFQLPVNNLGSLRKARKTVKKILSDIGLEYCKEHIEDFKQFEPNDFYLKNTTWEDVGLWDPSLTKNQDYRTKPFCCSACPFSSKFFSAYKSHFRNVHSEDFENRILLNCPYCTFNADKKTLETHIKIFHAPNASAPSSSLSTFKDKNKNDGLKPKQADSVEQAVYYCKKCTYRDPLYEIVRKHIYREHFQHVAAPYIAKAGEKSLNGAVPLGSNAREESSIHCKRCLFMPKSYEALVQHVIEDHERIGYQVTAMIGHTNVVVPRSKPLMLIAPKPQDKKSMGLPPRIGSLASGNVRSLPSQQMVNRLSIPKPNLNSTGVNMMSSVHLQQNNYGVKSVGQGYSVGQSMRLGLGGNAPVSIPQQSQSVKQLLPSGNGRSYGLGSEQRSQAPARYSLQSANASSLSSGQLKSPSLSQSQASRVLGQSSSKPAAAATGPPPGNTSSTQKWKICTICNELFPENVYSVHFEKEHKAEKVPAVANYIMKIHNFTSKCLYCNRYLPTDTLLNHMLIHGLSCPYCRSTFNDVEKMAAHMRMVHIDEEMGPKTDSTLSFDLTLQQGSHTNIHLLVTTYNLRDAPAESVAYHAQNNPPVPPKPQPKVQEKADIPVKSSPQAAVPYKKDVGKTLCPLCFSILKGPISDALAHHLRERHQVIQTVHPVEKKLTYKCIHCLGVYTSNMTASTITLHLVHCRGVGKTQNGQDKTNAPSRLNQSPSLAPVKRTYEQMEFPLLKKRKLDDDSDSPSFFEEKPEEPVVLALDPKGHEDDSYEARKSFLTKYFNKQPYPTRREIEKLAASLWLWKSDIASHFSNKRKKCVRDCEKYKPGVLLGFNMKELNKVKHEMDFDAEWLFENHDEKDSRVNASKTADKKLNLGKEDDSSSDSFENLEEESNESGSPFDPVFEVEPKISNDNPEEHVLKVIPEDASESEEKLDQKEDGSKYETIHLTEEPTKLMHNASDSEVDQDDVVEWKDGASPSESGPGSQQVSDFEDNTCEMKPGTWSDESSQSEDARSSKPAAKKKATMQGDREQLKWKNSSYGKVEGFWSKDQSQWKNASENDERLSNPQIEWQNSTIDSEDGEQFDNMTDGVAEPMHGSLAGVKLSSQQA

SEQ ID NO: 4465 - protein, 1102 aa, Homo sapiens; identical to SEQ ID NO: 4464

SEQ ID NO: 4466 - protein, 597 aa, Homo sapiens
MAEGSAVSDPQHAARLLRALSSFREESRFCDAHLVLDGEEIPVQKNILAAASPYIRTKLNYNPPKDDGSTYKIELEGISVMVMREILDYIFSGQIRLNEDTIQDVVQAADLLLLTDLKTLCCEFLEGCIAAENCIGIRDFALHYCLHHVHYLATEYLETHFRDVSSTEEFLELSPQKLKEVISLEKLNVGNERYVFEAVIRWIAHDTEIRKVHMKDVMSALWVSGLDSSYLREQMLNEPLVREIVKECSNIPLSQPQQGEAMLANFKPRGYSECIVTVGGEERVSRKPTAAMRCMCPLYDPNRQLWIELAPLSMPRINHGVLSAEGFLFVFGGQDENKQTLSSGEKYDPDANTWTALPPMNEARHNFGIVEIDGMLYILGGEDGEKELISMECYDIYSKTWTKQPDLTMVRKIGCYAAMKKKIYAMGGGSYGKLFESVECYDPRTQQWTAICPLKERRFGAVACGVAMELYVFGGVRSREDAQGSEMVTCKSEFYHDEFKRWIYLNDQNLCIPASSSFVYGAVPIGASIYVIGDLDTGTNYDYVREFKRSTGTWHHTKPLLPSDLRRTGCAALRIANCKLFRLQLQQGLFRIRVHSP

SEQ ID NO: 4467 - protein, 123 aa, Homo sapiens
MARGSALLLASLLLAAALSASAGLWSPAKEKRGWTLNSAGYLLGPHAVGNHRSFSDKNGLTSKRELRPEDDMKPGSFDRSIPENNIMRTIIEFLSFLHLKEAGALDRLLDLPAAASSEDIERS

SEQ ID NO: 4468 - protein, 294 aa, Homo sapiens
MAMSSGGSGGGVPEQEDSVLFRRGTGQSDDSDIWDDTALIKAYDKAVASFKHALKNGDICETSGKPKTTPKRKPAKKNKSQKKNTAASLQQWKVGDKCSAIWSEDGCIYPATIASIDFKRETCVVVYTGYGNREEQNLSDLLSPICEVANNIEQNAQENENESQVSTDESENSRSPGNKSDNIKPKSAPWNSFLPPPPPMPGPRLGPGKPGLKFNGPPPPPPPPPPHLLSCWLPPFPSGPPIIPPPPPICPDSLDDADALGSMLISWYMSGYHTGYYMGFRQNQKEGRCSHSLN

SEQ ID NO: 4469 - protein, 250 aa, Homo sapiens
MAMSSGGSGGGVPEQEDSVLFRRGTGQSDDSDIWDDTALIKAYDKAVASFKHALKNGDICETSGKPKTTPKRKPAKKNKSQKKNTAASLQQWKVGDKCSAIWSEDGCIYPATIASIDFKRETCVVVYTGYGNREEQNLSDLLSPICEVANNIEQNAQENENESQVSTDESENSRSPGNKSDNIKPKSAPWNSFLPPPPPMPGPRLGPGKIIPPPPPICPDSLDDADALGSMLISWYMSGYHTGYYMEMLA

SEQ ID NO: 4470 - protein, 262 aa, Homo sapiens
MAMSSGGSGGGVPEQEDSVLFRRGTGQSDDSDIWDDTALIKAYDKAVASFKHALKNGDICETSGKPKTTPKRKPAKKNKSQKKNTAASLQQWKVGDKCSAIWSEDGCIYPATIASIDFKRETCVVVYTGYGNREEQNLSDLLSPICEVANNIEQNAQENENESQVSTDESENSRSPGNKSDNIKPKSAPWNSFLPPPPPMPGPRLGPGKIIPPPPPICPDSLDDADALGSMLISWYMSGYHTGYYMGFRQNQKEGRCSHSLN

SEQ ID NO: 4471 - protein, 294 aa, Homo sapiens; identical to SEQ ID NO: 4468

SEQ ID NO: 4472 - DNA, 1515 bp, synthetic construct
  misc_feature 1..1515: note = Nucleic Acid sequence encoding GRA16
  source 1..1515: mol_type = other DNA
atgtatcgaaaccactcagggatacggcttgcctgcaggctcttcgaagttggagctctcgttttagctttagaaaatgtctctggtattcaccggttcgtcgccgggattgagtggaacgaagggaaagaggattttcagtacacgacgtctccttgggtgattccacctgacggattagtcagtcggcgacttgctgaggaacctcctagaaagcgcttgcgaaaaacaaacaaatcagatcgtgactcagattctgctcaaggttccaggacgacttctcctggcagtctgggcggttttggtgcaacagttgggcgtgttgccactccgcgaatacggagtggtgttgtggcgtcggaggcgatccgaggtacaatttggaggaggccaggtgaagtcgaaagcaccttgaagcttcgtagaaccaggcctcaatattcacaaacagatggagatggcttgcaggggaacaggctttcatcgacaggggaacgatcaggaatatcgcatggggcgcagtctctggcaatgcgcccaaggacaatgggacaaacaatgaaatctttggagagctcatgggattcggatccactcgaaggaacatcacgggattggcaatatgtaccaacgagtgagacagctgcttcgcccggccttaccggccttggagggattggtagaaagtttgcccctctttacgtacgagataggaaatttgacttacttcaatttgtgaatctgacgaggagcaagaaacagaaactcttaatgtcatcaaagagcccctcgctcagaaggctcctcatgaacgacatggcccaggaatgggctctaggaattttgcagatcgcgttgcagggacgacaaagagctctgcaggcttcccacaccacgcgaactacagaacccgcaagtggtactgacggcactagtaaatcgtcggaagacgaagcaacacgcgccagtgagggcaacgcttccgtcaaccagacatcccccgccgcgtcatatccgcgacggccctcttccgacgaagggcaggacagcggacgtagaaagtgttcaaagcgaagtccgtctcgtctcgtacagaacgctcctctttttctgaaggatgatagtcattcactgaaggacacgctggatttagtaaaaaacaagaaccgagagctgacggagaaggggagggtacatgccacccccctgagggtagttttgttaaatagtatcatgatgaagaaacttgagaaggtcttgccagtcgtcgaaagcatggacagagcactgatggctcgtcagacgtcttccgaagcagcgactgtggacgactctagcacttcaatttcacatggtatgcagggtagtaccacctcaggtgcagctgctgtacagggtcccagcacttcagttccaggtgcttcgggaggtcttggtccttcgggggggaagcggaaacccgacgacgaagatgattttgactgttcacgcgcgaagcggaaaaatgatcagatg

SEQ ID NO: 4473 - DNA, 2465 bp, synthetic construct
  misc_feature 1..2465: note = Nucleic Acid sequence of GRA16_5'UTR
  source 1..2465: mol_type = other DNA
cattttgaaacgtgagcgagtagacagggagtctgcgcatagaactgggcattcgtcctgaccactgttgcatgtgggacgaatcatcagagtatcggaaatgttgatttgataatttgcatctcctcaacatagctgcaaaatagaatgcacgttctataataacgtgcggctctatctacgtatcaggctgtagagagtcaacaacttccttagctacctatctatcagtatgcttatcaacctacctacccaccacatgatgtttgtgcctgagagtcctctacttgtgtccacatttgcggttccccccgtaattattgtttctctcgtatgcagagactagacttatatgcatcattcaccttcgacaacggctgggtatacatgtctggttgtcgcagcacacgctgccacagaggaggttagaaggaagtcgacaccggtcctattatgtactcgccaccgagccaatgcggtgccgtacgtcggagcaataaccaacgtaaccataatgaatacgtatgtatagggaggtcactatatacatatgggacctctccgaacgtcgtacaaggagcacagccatgcacaccaacgcgcaagtagctacactttgatgctagttgctgcattcgcattgtgtcgtttatgctttcatgcgcaaaaatggaagcaagaatcatgccgaatgcctggttctaagtggactgaatgcaaattttggcaagttttacatcattccagagcccttcgttatggacggggctcctgttcgggctgctgggttacgtgactctgtcaggtttgggttaatgtaactagatgaataacgatcgtacacatttggtgggtgggtaggctgctgatggttattttcagcgattaaaacaccactagcgaactcttctgggtacgcacctaccaggcacctgccgaccactcttcacatgccatttatctaaaactttttaaaatagaattatctttgaatatgaggatcgacatcgacaagctcttgtcagcttttgatgagggaaaattatgactggcgattatcccggataacgcaattcgataaatctacggtctaaacatgtgcaccgcctgtccgtgtaaccagcaaacctcaatgtgttttttgttacgcggcgaactggatactttcatccccactcgcagacgtcgaggggggatagcatccgcatgttaacttagtatctgtaagtcaggcggttcacatcggaagtgtacgttgcttgccgttcattgcattcagaatacggaactcatctgaactatttatgcttgtacaggtgatttaatggaaccaaccttgtggcttggcctttcggtgtcaagtggtgggaacctgggcgtctctaaaaggatcacgactgcggtaccgacgatggcactttacaacccgtatcgataaacagatgtttagagtacacatatgttcctgttccagacagacaaatcaacagcgacgcatgaatcaacggtcaacccttgcacgggctatctggcaatcgttctgctacttttcaggtctgacactgctggtatgccggcgcggcgttaatgccgcgttctgacaacaaacgtgtaaactgcttttcagtgccgcagctcacgctttacaaatgacttgactccatcctcgtggaccaagccaacttcttgcgcgcttcgtcgactgatagttagccgttcgccgattgtgcttcggaactaactacataagctcccgctaagaaccccacacggtgtggtgttgttttttgcgacggctgcagaacaggtgcttcttcacaggccccacagggccctttcaaggtggtcacagttttaaggtttcattcttattcccatttcttctgttacaagacggacggtgacagaggagcgtattcatctgtttgccgggttcgcactctgaaccagttggctgttttattcgtcactaataaggccggggctcggatcgccgttcagcgggcttgttggtctgtgtcgactttgtttggcacgcctatttctcgtggcgccgtaaagcaattcaaaggaacgcgtggggcatccgaacgaactcacttttcctgggagtttgttcggcttccggcagatccattgtcattgcttgtctgagcgaggacatccaatccgtgtttctgtgttgtcttagcggctggcttttgtgtcagaaggaatcggagctcgcagcgcgtcggtcaaagctttctgagacgtgttccttacactttggtgcctccatctttatacctgtgtgcgactgctcggcctactgtgaatagtctccgagctgccgtgtcggccgaggcttaaaccgatgctcggatgcctactgaggcacagcagcactgtgcagatactttgagtgaattcgcaagtgtgaattcaccagcaggaatcgtggtagactttgtgcggataccgtc

SEQ ID NO: 4474 - DNA, 27 bp, synthetic construct
  misc_feature 1..27: note = Nucleic Acid sequence encoding HA tag
  source 1..27: mol_type = other DNA
tacccgtacgacgtcccggactacgcg

SEQ ID NO: 4475 - DNA, 693 bp, synthetic construct
  misc_feature 1..693: note = Nucleic Acid sequence encoding HXGPRT
  source 1..693: mol_type = other DNA
atggcgtccaaacccattgaagactacggcaagggcaagggccgtattgagcccatgtatatccccgacaacaccttctacaacgctgatgactttcttgtgcccccccactgcaagccctacattgacaaaatcctcctccctggtggattggtcaaggacagagttgagaagttggcgtatgacatccacagaacttacttcggcgaggagttgcacatcatttgcatcctgaaaggctctcgcggcttcttcaaccttctgatcgactaccttgccaccatacagaagtacagtggtcgtgagtccagcgtgccccccttcttcgagcactatgtccgcctgaagtcctaccagaacgacaacagcacaggccagctcaccgtcttgagcgacgacttgtcaatctttcgcgacaagcacgttctgattgttgaggacatcgtcgacaccggtttcaccctcaccgagttcggtgagcgcctgaaagccgtcggtcccaagtcgatgagaatcgccaccctcgtcgagaagcgcacagatcgctccaacagcttgaagggcgacttcgtcggcttcagcattgaagacgtctggatcgttggttgctgctacgacttcaacgagatgttccgcgacttcgaccacgtcgccgtcctgagcgacgccgctcgcaaaaagttcgagaagtaa

SEQ ID NO: 4476 - DNA, 1506 bp, synthetic construct
  misc_feature 1..1506: note = Nucleic Acid sequence encoding MeCP2
  source 1..1506: mol_type = other DNA
atggccgccgctgccgccaccgccgccgccgccgccgcgccgagcggaggaggaggaggaggcgaggaggagagactggaggaaaagtcagaagaccaggatctccagggcctcagagacaagccactgaagtttaagaaggcgaagaaagacaagaaggaggacaaagaaggcaagcatgagccactacaaccttcagcccaccattctgcagagccagcagaggcaggcaaagcagaaacatcagaaagctcaggctctgccccagcagtgccagaagcctcggcttcccccaaacagcggcgctccattatccgtgaccggggacctatgtatgatgaccccaccttgcctgaaggttggacacgaaagcttaaacaaaggaagtctggccgatctgctggaaagtatgatgtatatttgatcaatccccagggaaaagcttttcgctctaaagtagaattgattgcatactttgaaaaggtgggagacacctccttggaccctaatgattttgacttcacggtaactgggagagggagcccctccaggagagagcagaaaccacctaagaagcccaaatctcccaaagctccaggaactggcaggggtcggggacgccccaaagggagcggcactgggagaccaaaggcagcagcatcagaaggtgttcaggtgaaaagggtcctggagaagagccctgggaaacttgttgtcaagatgcctttccaagcatcgcctgggggtaagggtgagggaggtggggctaccacatctgcccaggtcatggtgatcaaacgccctggcagaaagcgaaaagctgaagctgacccccaggccattcctaagaaacggggtagaaagcctgggagtgtggtggcagctgctgcagctgaggccaaaaagaaagccgtgaaggagtcttccatacggtctgtgcatgagactgtgctccccatcaagaagcgcaagacccgggagacggtcagcatcgaggtcaaggaagtggtgaagcccctgctggtgtccacccttggtgagaaaagcgggaagggactgaagacctgcaagagccctgggcgtaaaagcaaggagagcagccccaaggggcgcagcagcagtgcctcctccccacctaagaaggagcaccatcatcaccaccatcactcagagtccacaaaggcccccatgccactgctcccatccccacccccacctgagcctgagagctctgaggaccccatcagcccccctgagcctcaggacttgagcagcagcatctgcaaagaagagaagatgccccgaggaggctcactggaaagcgatggctgccccaaggagccagctaagactcagcctatggtcgccaccactaccacagttgcagaaaagtacaaacaccgaggggagggagagcgcaaagacattgtttcatcttccatgccaaggccaaacagagaggagcctgtggacagccggacgcccgtgaccgagagagttagctga

SEQ ID NO: 4477 - DNA, 1506 bp, synthetic construct
  misc_feature 1..1506: note = Nucleic Acid sequence encoding MECP2_codon_optimized
  source 1..1506: mol_type = other DNA
atggcagcagcggcagcgacggcagcggcagcagcagcacccagcggagggggagggggaggggaagaggaacgacttgaggagaaatctgaagaccaggacctccagggcctgagagacaagcccctcaagttcaagaaggcgaagaaggacaagaaggaagacaaggaaggcaagcacgaacctctgcagccgtctgcccaccactcggccgaaccggccgaagccggcaaggccgagacgtctgaatcttctggaagcgcgcccgccgtgcctgaagcctctgccagccctaagcagcgcagatctatcattcgcgaccgcggacctatgtacgacgaccctaccctccccgagggatggactcgcaagctgaagcagagaaagtctggaagatctgccggaaagtacgacgtctacctcatcaacccgcagggcaaggcgttccgcagcaaggtcgagctcatcgcgtacttcgaaaaagtgggagacacatctctggacccgaacgacttcgacttcaccgtgactggacgcggctctccttcgcgcagagagcagaagccgcctaagaagccgaagtctcctaaggccccgggaacaggaagaggaagaggccgccctaagggatctggaactggacgccctaaggccgccgcctctgaaggagtccaggtgaagcgcgtgctcgagaagtctccgggaaagctggtcgtgaagatgccgttccaggcctctcccggcggaaagggagaaggcggaggcgcgacaacaagcgcgcaggtcatggtcatcaagcgcccgggaagaaagagaaaggccgaggcggaccctcaggccatcccgaagaagcgcggaagaaagcctggatctgtggtggccgccgccgccgccgaggcgaagaagaaggcggtcaaggaaagctctatccgctcggtccacgagacggtgctgcctatcaagaagcgcaagacgcgcgagacagtcagcatcgaggtgaaggaagtcgtgaagcccctcctggtgagcacgctcggcgaaaagtctggcaagggactgaagacatgcaagtctcctggaagaaagtctaaggagtctagccctaagggaagatcttcttctgcctcttcgcccccgaagaaggaacaccatcatcaccaccaccacagcgagtctacaaaggccccgatgcctctcctgccttctcctcccccgcctgagcctgaaagctctgaggaccctatttcgcccccggaacctcaggacctctctagctctatctgcaaggaagagaagatgcctcgcggaggctctctggagtctgacggctgcccgaaggaacctgcgaagacacagccgatggtcgcgaccactacgacagtggcggagaagtacaagcaccgcggcgagggagaacgcaaggacatcgtctcgagctctatgcctagaccaaatagagaagaaccagttgactccagaacgccagtgaccgagcgggtgtcctga

SEQ ID NO: 4478 - DNA, 1237 bp, synthetic construct
  misc_feature 1..1237: note = Nucleic Acid sequence encoding PARK2
  source 1..1237: mol_type = other DNA
atgatagtgtttgtcaggttcaactccagccatggtttcccagtggaggtcgattctgacaccagcatcttccagctcaaggaggtggttgctaagcgacagggggttccggctgaccagttgcgtgtgattttcgcagggaaggagctgaggaatgactggactgtgcagaattgtgacctggatcagcagagcattgttcacattgtgcagagaccgtggagaaaaggtcaagaaatgaatgcaactggaggcgacgaccccagaaacgcggcgggaggctgtgagcgggagccccagagcttgactcgggtggacctcagcagctcagtcctcccaggagactctgtggggctggctgtcattctgcacactgacagcaggaaggactcaccaccagctggaagtccagcaggtagatcaatctacaacagcttttatgtgtattgtaaaggcccctgtcaaagagtgcagccggggaaactcagggtacagtgcagcacctgcaggcaggcaacgctcaccttgacccagggtccatcttgctgggatgatgttttaattccaaaccggatgagtggtgaatgccaatccccacactgccctgggactagtgcagaatttttctttaaatgtggagcacaccccacctctgacaaggaaacatcagtagctttgcacctgatcgcaacaaatagtcggaacatcacttgcattacgtgcacagacgtcaggagccccgtcctggttttccagtgcaactcccgccacgtgatttgcttagactgtttccacttatactgtgtgacaagactcaatgatcggcagtttgttcacgaccctcaacttggctactccctgccttgtgtgggaactggagacacagtggtgcttagaggagctctggggggattcaggagaggagtcgctggctgtcccaactccttgattaaagagctccatcacttcaggattctgggagaagagcagtacaaccggtaccagcagtatggtgcagaggagtgtgtcctgcagatggggggcgtgttatgcccccgccctggctgtggagcggggctgctgccggagcctgaccagaggaaagtcacctgcgaagggggcaatggcctgggctgtgggtatggacaacgaagaacaaaataagctgcctcagggagaagtgagtgcctcattcaatacatcgttcaaggaaaagtcattggtagcaaagctatag

SEQ ID NO: 4479 - DNA, 885 bp, synthetic construct
  misc_feature 1..885: note = Nucleic Acid sequence encoding SMN1
  source 1..885: mol_type = other DNA
atggcgatgagcagcggcggcagtggtggcggcgtcccggagcaggaggattccgtgctgttccggcgcggcacaggccagagcgatgattctgacatttgggatgatacagcactgataaaagcatatgataaagctgtggcttcatttaagcatgctctaaagaatggtgacatttgtgaaacttcgggtaaaccaaaaaccacacctaaaagaaaacctgctaagaagaataaaagccaaaagaagaatactgcagcttccttacaacagtggaaagttggggacaaatgttctgccatttggtcagaagacggttgcatttacccagctaccattgcttcaattgattttaagagagaaacctgtgttgtggtttacactggatatggaaatagagaggagcaaaatctgtccgatctactttccccaatctgtgaagtagctaataatatagaacaaaatgctcaagagaatgagaatgaaagccaagtttcaacagatgaaagtgagaactccaggtctcctggaaataaatcagataacatcaagcccaaatctgctccatggaactcttttctccctccaccaccccccatgccagggccaagactgggaccaggaaagccaggtctaaaattcaatggcccaccaccgccaccgccaccaccaccaccccacttactatcatgctggctgcctccatttccttctggaccaccaataattcccccaccacctcccatatgtccagattctcttgatgatgctgatgctttgggaagtatgttaatttcatggtacatgagtggctatcatactggctattatatgggttttagacaaaatcaaaaagaaggaaggtgctcacattccttaaattaa

SEQ ID NO: 4480 - DNA, 33 bp, synthetic construct
  misc_feature 1..33: note = Nucleic Acid sequence encoding TAT
  source 1..33: mol_type = other DNA
tatggacggaagaagcggcgacagcgacgacga

SEQ ID NO: 4481 - DNA, 735 bp, synthetic construct
  misc_feature 1..735: note = Nucleic Acid sequence encoding Toxofilin
  source 1..735: mol_type = other DNA
atggcgcaatacaagtcacgccctttggcagcttttctgctgctcattaccgtcggatcgctgctgaccgcatccgaatcggtccagctttctgaaggcatgaagaggctcagcatgagaggaagaagtcccagcccgaaaaggggaagattcgagagtggagacgaagggacatctacaatgtcgccctccgtcgcagcacgccaacaggaactagggctgctccgtccggaagagaggctcattgcgggtcaagccaaagcagcggcgctacagactgtccatcaattaggagcagttgctcttaccccagagcaagctaaagccgcactgctagacgaaattctcagagccacgcaaaatttggacctcaggaagtacgagaatctcaacacggagcaacaaaaggcctatgaacaagtccagagggatctttcgcaactgagtccggaaacgaaggctttgctcattgaaaatcagaggaaggagaaaaccctacttgaaaaggcgagaaagctcttccaaagacgccactaccacgttaccaagcaggcggctttggctggacaaatcctcaacgagcagagggatgcgagtggagcattacaatcaggtgctgtgaagactgcgatccaaagagccaacgagcagtacaacgtcgctgaggaagacaagaactttaacgaggaacagcatgcatcacaactgaaaaaggtaggcgctatgccctcgtcg

SEQ ID NO: 4482 - DNA, 1116 bp, synthetic construct
  misc_feature 1..1116: note = Nucleic Acid sequence of Toxofilin_5'UTR
  source 1..1116: mol_type = other DNA
atcaagcttgtgctcggttccatatgttagaagcgaactctccgcctcaatttttcttttctttggacttcggtggtcggcactgacgctttgctagccctcgcctttggcgacattcagcacccttgtctggaccaagccctttccccacgagcacagccgactggcaccagacgagtgtatggtatctctacgaaacacagcacgccgttactcctcgaggaaagagacacttttaaagaacagagaaaacgtctcgagaagattctgcgggcggcttcaccgctgctgcctttctgcgccatttagaacaaggtgttcgccacctcgtttatggcttatccggccttctgcttcaaaaggaaaggcgacccctgctagcgaccagtcttgtttctttgccaagaggcacctgcacgtcaaaacccaaacatcatttgctcggggtaaaatctgtcgcggactgtctacagcaaatacgctgctttctctgaaacaccagcgaccttgacaagccacacgcgggtcgccctagaccggctgtctgcgagtctgcaaacggcagttagccgaagcgaaaaaccaatcaggcacagcgctggactcggggcaccggtttcggtcagggccccgaaagaacccgtttcgtggcctgtgtcttttctctgctcgaagacgctagctgtgcttgtgtcttgcgctacctgcggcccctctaaatgtctgcccgcaactgctagctgctggtctcgttgaccgttgccgacaagatccacgagagcggcgacaacgagcataccagacccgaaggcaggagcggaatccgagcaaagacacctgtcaaaaataatccttttttatcttggactcggccggatctgtgtgtcttgcaaccactgcttcgcatagcgctgtcccgacatcccgcagcgccaaccgtaccacagtgttacttctgccagctagttattgcgcagtctcggccaggagccgcaaacagcgcgctggcggattcgcatttctatttccgggaattccaagtcaagacgcatgtcaagtgaccaaggcgtcgacgcgtcgaactctgtgaaagccttccacttgtaactggtcaac

SEQ ID NO: 4483 - DNA, 942 bp, synthetic construct
  misc_feature 1..942: note = Nucleic Acid sequence encoding ASPA
  source 1..942: mol_type = other DNA
atgacttcttgtcacattgctgaagaacatatacaaaaggttgctatctttggaggaacccatgggaatgagctaaccggagtatttctggttaagcattggctagagaatggcgctgagattcagagaacagggctggaggtaaaaccatttattactaaccccagagcagtgaagaagtgtaccagatatattgactgtgacctgaatcgcatttttgaccttgaaaatcttggcaaaaaaatgtcagaagatttgccatatgaagtgagaagggctcaagaaataaatcatttatttggtccaaaagacagtgaagattcctatgacattatttttgaccttcacaacaccacctctaacatggggtgcactcttattcttgaggattccaggaataactttttaattcagatgtttcattacattaagacttctctggctccactaccctgctacgtttatctgattgagcatccttccctcaaatatgcgaccactcgttccatagccaagtatcctgtgggtatagaagttggtcctcagcctcaaggggttctgagagctgatatcttggatcaaatgagaaaaatgattaaacatgctcttgattttatacatcatttcaatgaaggaaaagaatttcctccctgcgccattgaggtctataaaattatagagaaagttgattacccccgggatgaaaatggagaaattgctgctatcatccatcctaatctgcaggatcaagactggaaaccactgcatcctggggatcccatgtttttaactcttgatgggaagacgatcccactgggcggagactgtaccgtgtaccccgtgtttgtgaatgaggccgcatattacgaaaagaaagaagcttttgcaaagacaactaaactaacgctcaatgcaaaaagtattcgctgctgtttacattag

SEQ ID NO: 4484 - DNA, 1833 bp, synthetic construct
  misc_feature 1..1833: note = Nucleic Acid sequence encoding DHFR-TS_cDNA
  source 1..1833: mol_type = other DNA
atgcagaaaccggtgtgtctggtcgtcgcgatgacccccaagaggggcatcggcatcaacaacggcctcccgtggccccacttgaccacagatttcaaacacttttctcgtgtgacaaaaacgacgcccgaagaagccagtcgcctgaacgggtggcttcccaggaaatttgcaaagacgggcgactctggacttccctctccatcagtcggcaagagattcaacgccgttgtcatgggacggaaaacctgggaaagcatgcctcgaaagtttagacccctcgtggacagattgaacatcgtcgtttcctcttccctcaaagaagaagacattgcggcggagaagcctcaagctgaaggccagcagcgcgtccgagtctgtgcttcactcccagcagctctcagccttctggaggaagagtacaaggattctgtcgaccagatttttgtcgtgggaggagcgggactgtacgaggcagcgctgtctctgggcgttgcctctcacctgtacatcacgcgtgtagcccgcgagtttccgtgcgacgttttcttccctgcgttccccggagatgacattctttcaaacaaatcaactgctgcgcaggctgcagctcctgccgagtctgtgttcgttcccttttgtccggagctcggaagagagaaggacaatgaagcgacgtatcgacccatcttcatttccaagaccttctcagacaacggggtaccctacgactttgtggttctcgagaagagaaggaagactgacgacgcagccactgcggaaccgagcaacgcaatgagctccttgacgtccacgagggagacaactcccgtgcacgggttgcaggctccttcttcggccgcagccattgccccggtgttggcgtggatggacgaagaagaccggaaaaaacgcgagcaaaaggaactgattcgggccgttccgcatgttcactttagaggccatgaagaattccagtaccttgatctcattgccgacattattaacaatggaaggacaatggatgaccgaacgggcgttggtgtcatctccaaattcggctgcactatgcgctactcgctggatcaggcctttccacttctcaccacaaagcgtgtgttctggaaaggggtcctcgaagagttgctgtggttcattcgcggcgacacgaacgcaaaccatctttctgagaagggcgtgaagatctgggacaagaatgtgacacgcgagttcctcgattcgcgcaatctcccccaccgagaggtcggagacatcggcccgggctacggcttccagtggagacacttcggcgcggcatacaaagacatgcacacagactacacagggcagggcgtcgaccagctgaagaatgtgatccagatgctgagaacgaatccaacagatcgtcgcatgctcatgactgcctggaatcctgcagcgctggacgaaatggcgctgccgccttgtcacttgttgtgccagttctacgtgaacgaccagaaggagctgtcgtgcatcatgtatcagcggtcgtgcgatgtcggcctcggcgtccccttcaacatcgcttcctattcgcttttgacgctcatggttgcacacgtctgcaacctaaaacctaaggagttcattcacttcatggggaacacgcatgtctacacgaaccatgtcgaggctttaaaagagcagctgcggagagaaccgagaccgttccccattgtgaacatcctcaacaaggaacgcatcaaggaaatcgacgatttcaccgccgaggattttgaggtcgtgggctacgtcccgcacggacgaatccagatggagatggctgtctag

SEQ ID NO: 4485 - DNA, 8399 bp, synthetic construct
  misc_feature 1..8399: note = Nucleic Acid sequence of DHFR-TS_genomic
  source 1..8399: mol_type = other DNA
aagcttcgccaggctgtaaatcccgtgagtcgtcctcacaaatcatcaagcaggtgtcctcagggagactgcctgactgagttatgctaattcctttctactttggcgtggtcacgtgtaaccatatccgaatcatttctctagccctacgaacaggtaagagcgctagggatgtccgtggagtagtgtgcttactcgataatattcagttgggactaccagcgaggcgctcgctttgctcacgcaatgcctgagacagttgcagaatgaatggtaaccgacaaacgcgttcatatgcgttttcaaacttagtagacgcgtactgtctgaaactggcggtcacaggcaccagataacgcccttggcatcggcatgtctcgtacagaggtccgtatgtagtgccacgacttctaaatccggcgacaggctggtcttttgtcttaccacgtattagcccgcgtgcgatttctcggagcgcacctgttcaacactagaaaacggagtttcctgatcgagaagccaccacctttccagaagttgaacgctagcatgtcattcgattttcaccccccgcgtagttcctgtgtgtcattcgttgtcgagacaactctgtcccgccccggtgctgttccatatgcgtgactttcccgcaattttttcagactttcaggaaagacaggctccggaacgatctcgtccatgactggtaaatccacgacaccgcaatggcccccagcacctctatctctcgtgccaggggactaacgttgtatgcgtctgcgtcttgtctttttgcattcgctttccaaaaaagagagccatccgttcccccgcacattcaacgccgcgagtgcggtttttgtcttttttgagtggtaggacgcttttcatgcgcgaactacgtggacattaagttccattctctttttcgacagcacgaaaccttgcattcaaacccgcccgcggaagatccgatcttgctgctgttcgcagtcccagtagcgtcctgtcggccgcgccgtctctgttggtgggcagccgctacacctgttatctgactgccgtgcgcgaaaatgacgccatttttgggaaaatcggggaacttcattctttaaaagtatgcggaggtttcctttttcttctgttcgtttctttttctcgggtttgataaccgtgttcgatgtaagcactttccgtctctcctccgtgctttgttcgacatcgagaccaggtgtgcagatccttcgcttgtcgatccggagacgcgtgtctcgtagaaccttttcattttaccacacggcagtgcggagcactgctctgagtgcagcagggacgggtgaagtttcgctttagtagtgcgtttctgctctacggggcgttgtcgtgtctgggaagatgcagaaaccggtgtgtctggtcgtcgcgatgacccccaagaggggcatcggcatcaacaacggcctcccgtggccccacttgaccacagatttcaaacacttttctcgtgtgacaaaaacgacgcccgaagaagccagtcgcctgaacgggtggcttcccaggaaatttgcaaagacgggcgactctggacttccctctccatcagtcggcaagagattcaacgccgttgtcatgggacggaaaacctgggaaagcatgcctcgaaagtttagacccctcgtggacagattgaacatcgtcgtttcctcttccctgtgagcacacacagtagtcgccacacgctgtttgagacgtgtcaatctccaagagtgtggacgctgttccacgtcttcaaatgtttcccaacatccgtcgtctagtagacacaccaacaaaaagcacacggcgaatctgctcatcggagggaggagccggggggcacacaactatcctcaactctcgaacgaacatatccggggccgcgaagacgtccagtctctcaaatccaacccggaacgcaaacatttctgcatcaagtcacgattgcgccggtacctccatgtgtaagcagttccatgaaacctccgatattacacacgactgtggatatgaattatatgcagatgcatatatactgagacgccgatgcaactataggtttcctggccctccatggatatttcagaccttcctctcacatttggtttgcccgtacacctccgttacgctttttttctggctttcttcttcgtctctgtttatcagcaaagaagaagacattgcggcggagaagcctcaagctgaaggccagcagcgcgtccgagtctgtgcttcactcccagcagctctcagccttctggaggaagagtacaaggattctgtcgaccagatttttgtcgtgggtatgttgtcctaaactccttggaactccattcttggtcagaaacgtactgaaactgtatacatgtatatacagatgtatggataatatctagagaagatacagggaagactggcaaggatgaaaagacatgcagctttaacgaagcagagggcattggcgagagggacgcccgttatgctgtgtgatgtggctgtgaatcttacctcgccgtttgacttgctgcagcgctttgtccacttgaacgtgacttcttgtttctaccttccccaacgccttctattcccttcactgcgaaagcgcgctcagtgggccgtcaccgaacacccttggttctttcgttcagctgttgtcctctttctcgcgttgcttcctgtggcgtcgtggctcggcttctctctctttcctgttggtgcgtccagactatgtcgcctgtttccccacccttctcggcttgtgctttcaggaggagcgggactgtacgaggcagcgctgtctctgggcgttgcctctcacctgtacatcacgcgtgtagcccgcgagtttccgtgcgacgttttcttccctgcgttccccggagatgacattctttcaaacaaatcaactgctgcgcaggctgcagctcctgccgagtctgtgttcgttcccttttgtccggagctcggaagagagaaggacaatgaagcgacgtatcgacccatcttcatttccaagaccttctcagacaacggggtaccctacgactttgtggttctcgagaagagaaggaagactgacgacgcagccactgcggaaccggtaagaggcaaccgaagcgcgtagataagaaaaacaacaaagagaaggtgaaacacgaagagaagggaaaatgcggagaaaccgtggatttacaaagatatcaagagcaatgctttgtggagattttttttaattcagtagagacacccgccgtgcgaggtgtgtagaaataactgcgaccctggagacagagatgccgcgagtacaccacttgtcgtttttcctcctatgttcatgacgggtgctgaacgtctatcgtacttaattggaggagtcgtctccgaagcagctttggctggccatccgtgtgtttgccttgttcctgaaaagccagaaggcgctccacagtgaggcgatatacagggacgcctaccggagccccgttttctgcctttgtcgactcttgcagagcaacgcaatgagctccttgacgtccacgagggagacaactcccgtgcacgggttgcaggctccttcttcggccgcagccattgccccggtgttggcgtggatggacgaagaagaccggaaaaaacgcgagcaaaaggaactgattcgggccgttccgcatgttcactttagaggccatgaagaattccagtaccttgatctcattgccgacattattaacaatggaaggacaatggatgaccgaacgggtaacggcgactgcgagaaaaagccacaccgttttctcctgtgattctgtccgcaagccctcttttgcttcatccaccctttgctattctccgccgccttccttttctgctccatgttcaattcgttcgcttcttcagtctttccatcttcccctgttacctctgtcattcgttttcttgcctctatttaactgtgttctactcacagtctgcattccgcgatagacgagcttccacgtcttgcgtctcgacaagcaactgtcatttgtacgcgcctccctccaccgtgaatcggattgtcggttcgccggttcctgggtcagaaaaggcctgcgccagtattctgaataatacccttcgccattgtaaagaggcgaaggaacaaagagatatttcggcgcatcttttgtgcggcgcgtttcctcgtgcttcacaccgatgcccttctgtgcatgtcttctgctcctcgtccttctctctttttccctgtttaggcgttggtgtcatctccaaattcggctgcactatgcgctactcgctggatcaggcctttccacttctcaccacaaagcgtgtgttctggaaagggtaagggcgtcttcagtgaatgcatatatttgacttcagacattcttaactgtttgacaaccaacgtacaaatttgtttgtccgtgtgcgtgttcgacatgtcaagtatgtgaagagtcgctactgtagactaacgcacgaaccagatttgtttatctgcatgcgctgtgcacccgtttctgagtgtctggagtttccgcaaccttcctttgaatttctgggttcgtttttttatgcgcgcactggtttgcatgtggcctgagagagcacagatcgaaggtggggtgatgtggcgtcgctgcagagaaactccggcgaaggcgacagataaaggagagtggaaatcattgaacagtgtcggtcgtctgttgtttcgcagggtcctcgaagagttgctgtggttcattcgcggcgacacgaacgcaaaccatctttctgagaagggcgtgaaggcaagtctacgttgtacctcttgtctctgccgaagctcagatgtctccacggcgttggtttcttttcgtttttgctttcgtggcattaccatcgagtcaccactcatagttgcgtgtgtctacatgttttctagaacgtccgttgtgttgcctcgtggcgaccggcgcgagtgtatgtaccctgcgctgtcagaagttgatccttacgctgctaatgggatcgtttagaccttcccatagcactgactttcttcttcgcatgttccactctgtgcgttcgtgtccgtggcgtcgtctgctctgtgaaaacgcgtctcgatgcgcaaccgcacaaagtaggggcgtacgtcagcagattctcatgcctgttgatcgccgtggtgttggtgcctgctcgtcttagatctgggacaagaatgtgacacgcgagttcctcgattcgcgcaatctcccccaccgagaggtcggagacatcggcccgggctacggcttccagtggagacacttcggcgcggcatacaaagacatgcacacagactacacaggtatatgccggcaatgtgtgcagggaaggggcacaagcggaagaactctggcgcaacagcacctggctgaatcgtggtttgcctcaggtgcagatccggccattttaaaacgcaagttccatcagacgcggacaggaaatgacataacagacatatacatgtacgacgcagtgctccctctcatcctgagacggatgtcaaggtggacgaaagccggttatggcctcatctggtgatgtagactcgcccatcccgtgatccctccaggcgtcggtgtttgtatgctgttttctggaaccttttacacctgcgttcacacatgtctgcgcagatgcacagcgtcaggggcctggagaagaaagacgtccagcaattcgtttctcacatgtgttctttgcagggcagggcgtcgaccagctgaagaatgtgatccagatgctgagaacgaatccaacagatcgtcgcatgctcatgactgcctggaatcctgcaggtgagccttgcgtgtcgttcatctgtctattgtctcaggtgcccatgcatgcgttttaacctcatgttttctctgcatttgtgccgtctctgcgtcttcacatgggaaaggcacaagagcagccgtggttgagtacaaacgacctcagtctacttccattttgcagctctcgcaaacgatgtcgcgtgtttgtacccgcaacgcctctctgtcttgcatccattttgcgtctttcttggtgtctgtatgcctagtagtctgtcagttcccgcgcgcaggctgcaccccgcctttcattgctcgcagcgtttgcccccggttagtactcgtgtgtgttccctggatctctctgcacatggccattccgttgttttgccattccgccgccgttgcttcgtccgcccccgctttctcagcgcctttcttccctctcgtgccttgcctacctaccagcgtcttccctattttatcgccgaggtgctcgcgttttctgcgttggctgcgctcgatcgcagttcgcgtcacgtcttcgtcgaatctgggacttcgagccacggcgatggtggcgcctccgcgtgttttctctcaccgtgcacatttctccacgctgttgcttttgcgttcagcgctggacgaaatggcgctgccgccttgtcacttgttgtgccagttctacgtgaacgaccagaaggagctgtcgtgcatcatgtatcagcggtcgtgcgatgtcggcctcggcgtccccttcaacatcgcttcctattcgcttttgacgctcatggttgcacacgtctgcaacctaaaacctaaggagttcattcacttcatggggaacacgcatgtctacacgaaccatgtcgaggctttaaaagagcagctgcggagagaaccgagaccgttccccattgtgaacatcctcaacaaggaacgcatcaaggtgagcacaagttgcaaaggaaaaacgacagtcgatgccagcagaagaaggacgcgcaggggagactgcagctctgcgccgctgcctcgactcggcctatagtcagaaaggcaggggtgcaacgtggaagaaaggtcaaggtaaaggtggaaaacccatttgctcggaatgccttacctccgtggctcgagggggaacgcgaacaatagaggaaactggtgcagttagcgcgggcaactgctaaagaatgttcaagaatgcttctgtctccacgcgattgtgaggacgtctgagcgtttttctgtgtttgcttctcgtgtttcgcgggtgtgttgtgccattttcggtggcagcgcacatgtatctgatccccagaatacggaaaagaagcaatcacacgaagttttgtatcatccggcggatttggcgttagacctgacagcaacggccataggtttctcgcgtgtgttcggcgcttcgatggcccaaagagctcgcatggtgccgcgtttctatggattcgtttaccaggaaatcgacgatttcaccgccgaggattttgaggtcgtgggctacgtcccgcacggacgaatccagatggagatggctgtctagcggaaatacagaagctgcccgtctctcgttttcctctcttttcggagggatcagggagagtgcctcgggtcggagagagctgacgagggggtgccagagacccctgtgtcctttatcgaagaaaagggatgactcttcatgtggcatttcacacagtctcacctcgccttgttttctttttgtcaatcagaacgaaagcgagttgcgggtgacgcagatgtgcgtgtatccactcgtgaatgcgttatcgttctgtatgccgctagagtgctggactgttgctgtctgcccacgacagcagacaactttccttctatgcacttgcaggatggtgcagcgcaaacgacggagagaaaggagcaccctctcagtttccctacgatgtgctgtcagtttcgactcttcaccgcgaacgattggcgatacgtctctgttgacttgttaggctccgaccacgaagctcccttaactaaataagccgcgacacctaagtgtacaccatttgcagatcgataatctgcgaccgctgaatccgtccagatcagtaaaaccgcaccacctaagtgtaaaccttgtttaggtcgataaaatgctaccaacccccacccacaatcgagccttgagcgtttctgcgcacgcgttggcctacgtgacttgctgatgcctgcctctggccattcatgccagtcagtgcgcataaaaatgtggacacagtcggttgacaagtgttctggcaggctacagtgacacggggaaatcgtttctgagagagcaccaaaaccttttagctgtcaccatcttcttcgcttgctacgttgtctgatttgtcgtttttcctctcggtgtgaagcgtttttcgtaacgtcaatcgacccaggacactgcttccagctgtctgtgccgtcctgtcgtgaccagtttgtcgccgcgactttatgagctttttcctgttgagaaagcggttcggcggccgc

SEQ ID NO: 4486 - DNA, 2010 bp, synthetic construct
  misc_feature 1..2010: note = Nucleic Acid sequence encoding GALC
  source 1..2010: mol_type = other DNA
atgactgcggccgcgggttcggcgggccgcgccgcggtgcccttgctgctgtgtgcgctgctggcgcccggcggcgcgtacgtgctcgacgactccgacgggctgggccgggagttcgacggcatcggcgcggtcagcggcggcggggcaacctcccgacttctagtaaattacccagagccctatcgttctcagatattggattatctctttaagccgaattttggtgcctctttgcatattttaaaagtggaaataggtggtgatgggcagacaacagatggcactgagccctcccacatgcattatgcactagatgagaattatttccgaggatacgagtggtggttgatgaaagaagctaagaagaggaatcccaatattacactcattgggttgccatggtcattccctggatggctgggaaaaggtttcgactggccttatgtcaatcttcagctgactgcctattatgtcgtgacctggattgtgggcgccaagcgttaccatgatttggacattgattatattggaatttggaatgagaggtcatataatgccaattatattaagatattaagaaaaatgctgaattatcaaggtctccagcgagtgaaaatcatagcaagtgataatctctgggagtccatctctgcatccatgctccttgatgccgaactcttcaaggtggttgatgttataggggctcattatcctggaacccattcagcaaaagatgcaaagttgactgggaagaagctttggtcttctgaagactttagcactttaaatagtgacatgggtgcaggctgctggggtcgcattttaaatcagaattatatcaatggctatatgacttccacaatcgcatggaatttagtggctagttactatgaacagttgccttatgggagatgcgggttgatgacggcccaggagccatggagtgggcactacgtggtagaatctcctgtctgggtatcagctcataccactcagtttactcaacctggctggtattacctgaagacagttggccatttagagaaaggaggaagctacgtagctctgactgatggcttagggaacctcaccatcatcattgaaaccatgagtcataaacattctaagtgcatacggccatttcttccttatttcaatgtgtcacaacaatttgccacctttgttcttaagggatcttttagtgaaataccagagctacaggtatggtataccaaacttggaaaaacatccgaaagatttctttttaagcagctggattctctatggctccttgacagcgatggcagtttcacactgagcctgcatgaagatgagctgttcacactcaccactctcaccactggtcgcaaaggcagctacccgcttcctccaaaatcccagcccttcccaagtacctataaggatgatttcaatgttgattacccattttttagtgaagctccaaactttgctgatcaaactggtgtatttgaatattttacaaatattgaagaccctggcgagcatcacttcacgctacgccaagttctcaaccagagacccattacgtgggctgccgatgcatccaacacaatcagtattataggagactacaactggaccaatctgactacaaagtgtgatgtttacatagagacccctgacacaggaggtgtgttcattgcaggaagagtaaataaaggtggtattttgattagaagtgccagaggaattttcttctggatttttgcaaatggatcttacagggttacaggtgatttagctggatggattatatatgctttaggacgtgttgaagttacagcaaaaaaatggtatacactcacgttaactattaagggtcatttcgcctctggcatgctgaatgacaagtctctgtggacagacatccctgtgaattttccaaagaatggctgggctgcaattggaactcactcctttgaatttgcacagtttgacaactttcttgtggaagccacacgctaa

SEQ ID NO: 4487 - DNA, 1925 bp, synthetic construct
  misc_feature 1..1925: note = Nucleic Acid sequence encoding mutated GALC-TAT
  source 1..1925: mol_type = other DNA
atgactgcggcggcggggcaacctcccgacttctagtaaattacccagagccctatcgttctcagatattggattatctctttaagccgaattttggtgcctctttgcatattttaaaagtggaaataggtggtgatgggcagacaacagatggcactgagccctcccacatgcattatgcactagatgagaattatttccgaggatacgagtggtggttgatgaaagaagctaagaagaggaatcccaatattacactcattgggttgccatggtcattccctggatggctgggaaaaggtttcgactggccttatgtcaatcttcagctgactgcctattatgtcgtgacctggattgtgggcgccaagcgttaccatgatttggacattgattatattggaatttggaatgagaggtcatataatgccaattatattaagatattaagaaaaatgctgaattatcaaggtctccagcgagtgaaaatcatagcaagtgataatctctgggagtccatctctgcatccatgctccttgatgccgaactcttcaaggtggttgatgttataggggctcattatcctggaacccattcagcaaaagatgcaaagttgactgggaagaagctttggtcttctgaagactttagcactttaaatagtgacatgggtgcaggctgctggggtcgcattttaaatcagaattatatcaatggctatatgacttccacaatcgcatggaatttagtggctagttactatgaacagttgccttatgggagatgcgggttgatgacggcccaggagccatggagtgggcactacgtggtagaatctcctgtctgggtatcagctcataccactcagtttactcaacctggctggtattacctgaagacagttggccatttagagaaaggaggaagctacgtagctctgactgatggcttagggaacctcaccatcatcattgaaaccatgagtcataaacattctaagtgcatacggccatttcttccttatttcaatgtgtcacaacaatttgccacctttgttcttaagggatcttttagtgaaataccagagctacaggtatggtataccaaacttggaaaaacatccgaaagatttctttttaagcagctggattctctatggctccttgacagcgatggcagtttcacactgagcctgcatgaagatgagctgttcacactcaccactctcaccactggtcgcaaaggcagctacccgcttcctccaaaatcccagcccttcccaagtacctataaggatgatttcaatgttgattacccattttttagtgaagctccaaactttgctgatcaaactggtgtatttgaatattttacaaatattgaagaccctggcgagcatcacttcacgctacgccaagttctcaaccagagacccattacgtgggctgccgatgcatccaacacaatcagtattataggagactacaactggaccaatctgactacaaagtgtgatgtttacatagagacccctgacacaggaggtgtgttcattgcaggaagagtaaataaaggtggtattttgattagaagtgccagaggaattttcttctggatttttgcaaatggatcttacagggttacaggtgatttagctggatggattatatatgctttaggacgtgttgaagttacagcaaaaaaatggtatacactcacgttaactattaagggtcatttcgcctctggcatgctgaatgacaagtctctgtggacagacatccctgtgaattttccaaagaatggctgggctgcaattggaactcactcctttgaatttgcacagtttgacaactttcttgtggaagccacacgcggcggtggcggttatggacggaagaagcggcgacagcgacgacgataa

SEQ ID NO: 4488 - DNA, 2055 bp, synthetic construct
  misc_feature 1..2055: note = Nucleic Acid sequence encoding GALC-TAT
  source 1..2055: mol_type = other DNA
atgactgcggccgcgggttcggcgggccgcgccgcggtgcccttgctgctgtgtgcgctgctggcgcccggcggcgcgtacgtgctcgacgactccgacgggctgggccgggagttcgacggcatcggcgcggtcagcggcggcggggcaacctcccgacttctagtaaattacccagagccctatcgttctcagatattggattatctctttaagccgaattttggtgcctctttgcatattttaaaagtggaaataggtggtgatgggcagacaacagatggcactgagccctcccacatgcattatgcactagatgagaattatttccgaggatacgagtggtggttgatgaaagaagctaagaagaggaatcccaatattacactcattgggttgccatggtcattccctggatggctgggaaaaggtttcgactggccttatgtcaatcttcagctgactgcctattatgtcgtgacctggattgtgggcgccaagcgttaccatgatttggacattgattatattggaatttggaatgagaggtcatataatgccaattatattaagatattaagaaaaatgctgaattatcaaggtctccagcgagtgaaaatcatagcaagtgataatctctgggagtccatctctgcatccatgctccttgatgccgaactcttcaaggtggttgatgttataggggctcattatcctggaacccattcagcaaaagatgcaaagttgactgggaagaagctttggtcttctgaagactttagcactttaaatagtgacatgggtgcaggctgctggggtcgcattttaaatcagaattatatcaatggctatatgacttccacaatcgcatggaatttagtggctagttactatgaacagttgccttatgggagatgcgggttgatgacggcccaggagccatggagtgggcactacgtggtagaatctcctgtctgggtatcagctcataccactcagtttactcaacctggctggtattacctgaagacagttggccatttagagaaaggaggaagctacgtagctctgactgatggcttagggaacctcaccatcatcattgaaaccatgagtcataaacattctaagtgcatacggccatttcttccttatttcaatgtgtcacaacaatttgccacctttgttcttaagggatcttttagtgaaataccagagctacaggtatggtataccaaacttggaaaaacatccgaaagatttctttttaagcagctggattctctatggctccttgacagcgatggcagtttcacactgagcctgcatgaagatgagctgttcacactcaccactctcaccactggtcgcaaaggcagctacccgcttcctccaaaatcccagcccttcccaagtacctataaggatgatttcaatgttgattacccattttttagtgaagctccaaactttgctgatcaaactggtgtatttgaatattttacaaatattgaagaccctggcgagcatcacttcacgctacgccaagttctcaaccagagacccattacgtgggctgccgatgcatccaacacaatcagtattataggagactacaactggaccaatctgactacaaagtgtgatgtttacatagagacccctgacacaggaggtgtgttcattgcaggaagagtaaataaaggtggtattttgattagaagtgccagaggaattttcttctggatttttgcaaatggatcttacagggttacaggtgatttagctggatggattatatatgctttaggacgtgttgaagttacagcaaaaaaatggtatacactcacgttaactattaagggtcatttcgcctctggcatgctgaatgacaagtctctgtggacagacatccctgtgaattttccaaagaatggctgggctgcaattggaactcactcctttgaatttgcacagtttgacaactttcttgtggaagccacacgcggcggtggcggttatggacggaagaagcggcgacagcgacgacgataa

SEQ ID NO: 4489 - DNA, 609 bp, synthetic construct
  misc_feature 1..609: note = Nucleic Acid sequence encoding GDNF
  source 1..609: mol_type = other DNA
atgaagttatgggatgtcgtggctgtctgcctggtgctgctccacaccgcgtccgccttcccgctgcccgccgaagaccgctccctcggccgccgccgcgcgcccttcgcgctgagcagtgactcaaatatgccagaggattatcctgatcagttcgatgatgtcatggattttattcaagccaccattaaaagactgaaaaggtcaccagataaacaaatggcagtgcttcctagaagagagcggaatcggcaggctgcagctgccaacccagagaattccagaggaaaaggtcggagaggccagaggggcaaaaaccggggttgtgtcttaactgcaatacatttaaatgtcactgacttgggtctgggctatgaaaccaaggaggaactgatttttaggtactgcagcggctcttgcgatgcagctgagacaacgtacgacaaaatattgaaaaacttatccagaaatagaaggctggtgagtgacaaagtagggcaggcatgttgcagacccatcgcctttgatgatgacctgtcgtttttagatgataacctggtttaccatattctaagaaagcattccgctaaaaggtgtggatgtatctga

SEQ ID NO: 4490 - DNA, 12 bp, synthetic construct
  misc_feature 1..12: note = Nucleic Acid sequence of Gly_linker
  source 1..12: mol_type = other DNA
ggcggtggcggt

SEQ ID NO: 4491 - DNA, 428 bp, synthetic construct
  misc_feature 1..428: note = Nucleic Acid sequence of GRA2_3'UTR
  source 1..428: mol_type = other DNA
ttaattaagactacgacgaaagtgatgcgcaggctggaaagccgctgaagggagaagtctacaaagccgatcagtgaaaaatgtgtggggaggtggtcttgttgcaggaatgcaatggtgttaagcatcgtgttcgaatgcagtgcgtgtatcagttgtgcgcggaaggacactgcttcaatgttaagaacctgttttctccgtagagaggaccaaaagacgattgcaaaactggtatgtacgcaatagcccaatgccggacgtcagttggttgtatgtgacgctcccagatgtcatatgccttgtgagtgtgtctgggatgcaagtttttggtgtgcgttgatttcgccagcttatgacagtggcagacgaattattgacatgatacaaggacgcagaaaggaacaaacaccgtagttccagtcgac

SEQ ID NO: 4492 - DNA, 451 bp, synthetic construct
  misc_feature 1..451: note = Nucleic Acid sequence of DHFR-TS_5'UTR
  source 1..451: mol_type = other DNA
cagcacgaaaccttgcattcaaacccgcccgcggaagatccgatcttgctgctgttcgcagtcccagtagcgtcctgtcggccgcgccgtctctgttggtgggcagccgctacacctgttatctgactgccgtgcgcgaaaatgacgccatttttgggaaaatcggggaacttcattctttaaaagtatgcggaggtttcctttttcttctgttcgtttctttttctcgggtttgataaccgtgttcgatgtaagcactttccgtctctcctccgtgctttgttcgacatcgagaccaggtgtgcagatccttcgcttgtcgatccggagacgcgtgtctcgtagaaccttttcattttaccacacggcagtgcggagcactgctctgagtgcagcagggacgggtgaagtttcgctttagtagtgcgtttctgctctacggggcgttgtc

SEQ ID NO: 4493 - DNA, 743 bp, synthetic construct
  misc_feature 1..743: note = Nucleic Acid sequence of DHFR-TS_3'UTR
  source 1..743: mol_type = other DNA
acagaagctgcccgtctctcgttttcctctcttttcggagggatcagggagagtgcctcgggtcggagagagctgacgagggggtgccagagacccctgtgtcctttatcgaagaaaagggatgactcttcatgtggcatttcacacagtctcacctcgccttgttttctttttgtcaatcagaacgaaagcgagttgcgggtgacgcagatgtgcgtgtatccactcgtgaatgcgttatcgttctgtatgccgctagagtgctggactgttgctgtctgcccacgacagcagacaactttccttctatgcacttgcaggatggtgcagcgcaaacgacggagagaaaggagcaccctctcagtttccctacgatgtgctgtcagtttcgactcttcaccgcgaacgattggcgatacgtctctgttgacttgttaggctccgaccacgaagctcccttaactaaataagccgcgacacctaagtgtacaccatttgcagatcgataatctgcgaccgctgaatccgtccagatcagtaaaaccgcaccacctaagtgtaaaccttgtttaggtcgataaaatgctaccaacccccacccacaatcgagccttgagcgtttctgcgcacgcgttggcctacgtgacttgctgatgcctgcctctggccattcatgccagtcagtgcgcataaaaatgtggacacagtcggttgacaagtgttctggcaggctacagtgacac

SEQ ID NO: 4494 - DNA, 102 bp, synthetic construct
  misc_feature 1..102: note = Nucleic Acid sequence of TALE Monomer templates pNN
  source 1..102: mol_type = other DNA
ctcaccccagagcaggtcgtggcaattgcgagcaacaacgggggaaagcaggcactcgaaaccgtccagaggttgctgcctgtgctgtgccaagcgcacgga

SEQ ID NO: 4495 - DNA, 102 bp, synthetic construct
  misc_feature 1..102: note = Nucleic Acid sequence of TALE Monomer templates pHD
  source 1..102: mol_type = other DNA
ctcaccccagagcaggtcgtggcaattgcgagccatgacgggggaaagcaggcactcgaaaccgtccagaggttgctgcctgtgctgtgccaagcgcacgga

SEQ ID NO: 4496 - DNA, 3782 bp, synthetic construct
  misc_feature 1..3782: note = Nucleic Acid sequence of pTALE-TF (NI)
  source 1..3782: mol_type = other DNA
atgtcgcggacccggctcccttccccacccgcacccagcccagcgttttcggccgactcgttctcagacctgcttaggcagttcgacccctcactgtttaacacatcgttgttcgactcccttcctccgtttggggcgcaccatacggaggcggccaccggggagtgggatgaggtgcagtcgggattgagagctgcggatgcaccacccccaaccatgcgggtggccgtcaccgctgcccgaccgccgagggcgaagcccgcaccaaggcggagggcagcgcaaccgtccgacgcaagccccgcagcgcaagtagatttgagaactttgggatattcacagcagcagcaggaaaagatcaagcccaaagtgaggtcgacagtcgcgcagcatcacgaagcgctggtgggtcatgggtttacacatgcccacatcgtagccttgtcgcagcaccctgcagcccttggcacggtcgccgtcaagtaccaggacatgattgcggcgttgccggaagccacacatgaggcgatcgtcggtgtggggaaacagtggagcggagcccgagcgcttgaggccctgttgacggtcgcgggagagctgagagggcctccccttcagctggacacgggccagttgctgaagatcgcgaagcggggaggagtcacggcggtcgaggcggtgcacgcgtggcgcaatgcgctcacgggagcacccctcaacctgacagagaccgcggccgcattaggcaccccaggctttacactttatgcttccggctcgtataatgtgtggattttgagttaggatccgtcgagattttcaggagctaaggaagctaaaatggagaaaaaaatcactggatataccaccgttgatatatcccaatggcatcgtaaagaacattttgaggcatttcagtcagttgctcaatgtacctataaccagaccgttcagctggatattacggcctttttaaagaccgtaaagaaaaataagcacaagttttatccggcctttattcacattcttgcccgcctgatgaatgctcatccggaattccgtatggcaatgaaagacggtgagctggtgatatgggatagtgttcacccttgttacaccgttttccatgagcaaactgaaacgttttcatcgctctggagtgaataccacgacgatttccggcagtttctacacatatattcgcaagatgtggcgtgttacggtgaaaacctggcctatttccctaaagggtttattgagaatatgtttttcgtctcagccaatccctgggtgagtttcaccagttttgatttaaacgtggccaatatggacaacttcttcgcccccgttttcaccatgggcaaatattatacgcaaggcgacaaggtgctgatgccgctggcgattcaggttcatcatgccgtttgtgatggcttccatgtcggcagaatgcttaatgaattacaacagtactgcgatgagtggcagggcggggcgtaaagatctggatccggcttactaaaagccagataacagtatgcgtatttgcgcgctgatttttgcggtataagaatatatactgatatgtatacccgaagtatgtcaaaaagaggtatgctatgaagcagcgtattacagtgacagttgacagcgacagctatcagttgctcaaggcatatatgatgtcaatatctccggtctggtaagcacaaccatgcagaatgaagcccgtcgtctgcgtgccgaacgctggaaagcggaaaatcaggaagggatggctgaggtcgcccggtttattgaaatgaacggctcttttgctgacgagaacaggggctggtgaaatgcagtttaaggtttacacctataaaagagagagccgttatcgtctgtttgtggatgtacagagtgatattattgacacgcccgggcgacggatggtgatccccctggccagtgcacgtctgctgtcagataaagtctcccgtgaactttacccggtggtgcatatcggggatgaaagctggcgcatgatgaccaccgatatggccagtgtgccggtctccgttatcggggaagaagtggctgatctcagccaccgcgaaaatgacatcaaaaacgccattaacctgatgttctggggaatataaatgtcaggctcccttatacacagccagtctgcaggtcgacggtctcgactcacgcctgagcaggtagtggctattgcatccaatatcgggggcagacccgcactggagtcaatcgtggcccagctttcgaggccggaccccgcgctggccgcactcactaatgatcatcttgtagcgctggcctgcctcggcggacgacccgccttggatgcggtgaagaaggggctcccgcacgcgcctgcattgattaagcggaccaacagaaggattcccgagaggacatcacatcgagtggcagatcacgcgcaagtggtccgcgtgctcggattcttccagtgtcactcccaccccgcacaagcgttcgatgacgccatgactcaatttggtatgtcgagacacggactgctgcagctctttcgtagagtcggtgtcacagaactcgaggcccgctcgggcacactgcctcccgcctcccagcggtgggacaggattctccaagcgagcggtatgaaacgcgcgaagccttcacctacgtcaactcagacacctgaccaggcgagccttcatgcgttcgcagactcgctggagagggatttggacgcgccctcgcccatgcatgaaggggaccaaactcgcgcgtcagctagccccaagaagaagagaaaggtggaggccagcggttccggacgggctgacgcattggacgattttgatctggatatgctgggaagtgacgccctcgatgattttgaccttgacatgcttggttcggatgcccttgatgactttgacctcgacatgctcggcagtgacgcccttgatgatttcgacctggacatgctgattaactctagaggcagtggagagggcagaggaagtctgctaacatgcggtgacgtcgaggagaatcctggcccagtgagcaagggcgaggagctgttcaccggggtggtgcccatcctggtcgagctggacggcgacgtaaacggccacaagttcagcgtgtccggcgagggcgagggcgatgccacctacggcaagctgaccctgaagttcatctgcaccaccggcaagctgcccgtgccctggcccaccctcgtgaccaccctgacctacggcgtgcagtgcttcagccgctaccccgaccacatgaagcagcacgacttcttcaagtccgccatgcccgaaggctacgtccaggagcgcaccatcttcttcaaggacgacggcaactacaagacccgcgccgaggtgaagttcgagggcgacaccctggtgaaccgcatcgagctgaagggcatcgacttcaaggaggacggcaacatcctggggcacaagctggagtacaactacaacagccacaacgtctatatcatggccgacaagcagaagaacggcatcaaggtgaacttcaagatccgccacaacatcgaggacggcagcgtgcagctcgccgaccactaccagcagaacacccccatcggcgacggccccgtgctgctgcccgacaaccactacctgagcacccagtccgccctgagcaaagaccccaacgagaagcgcgatcacatggtcctgctggagttcgtgaccgccgccgggatcactctcggcatggacgagctgtacaagtaa

SEQ ID NO: 4497 - DNA, 3782 bp, synthetic construct
  misc_feature 1..3782: note = Nucleic Acid sequence of pTALE-TF (NG)
  source 1..3782: mol_type = other DNA
atgtcgcggacccggctcccttccccacccgcacccagcccagcgttttcggccgactcgttctcagacctgcttaggcagttcgacccctcactgtttaacacatcgttgttcgactcccttcctccgtttggggcgcaccatacggaggcggccaccggggagtgggatgaggtgcagtcgggattgagagctgcggatgcaccacccccaaccatgcgggtggccgtcaccgctgcccgaccgccgagggcgaagcccgcaccaaggcggagggcagcgcaaccgtccgacgcaagccccgcagcgcaagtagatttgagaactttgggatattcacagcagcagcaggaaaagatcaagcccaaagtgaggtcgacagtcgcgcagcatcacgaagcgctggtgggtcatgggtttacacatgcccacatcgtagccttgtcgcagcaccctgcagcccttggcacggtcgccgtcaagtaccaggacatgattgcggcgttgccggaagccacacatgaggcgatcgtcggtgtggggaaacagtggagcggagcccgagcgcttgaggccctgttgacggtcgcgggagagctgagagggcctccccttcagctggacacgggccagttgctgaagatcgcgaagcggggaggagtcacggcggtcgaggcggtgcacgcgtggcgcaatgcgctcacgggagcacccctcaacctgacagagaccgcggccgcattaggcaccccaggctttacactttatgcttccggctcgtataatgtgtggattttgagttaggatccgtcgagattttcaggagctaaggaagctaaaatggagaaaaaaatcactggatataccaccgttgatatatcccaatggcatcgtaaagaacattttgaggcatttcagtcagttgctcaatgtacctataaccagaccgttcagctggatattacggcctttttaaagaccgtaaagaaaaataagcacaagttttatccggcctttattcacattcttgcccgcctgatgaatgctcatccggaattccgtatggcaatgaaagacggtgagctggtgatatgggatagtgttcacccttgttacaccgttttccatgagcaaactgaaacgttttcatcgctctggagtgaataccacgacgatttccggcagtttctacacatatattcgcaagatgtggcgtgttacggtgaaaacctggcctatttccctaaagggtttattgagaatatgtttttcgtctcagccaatccctgggtgagtttcaccagttttgatttaaacgtggccaatatggacaacttcttcgcccccgttttcaccatgggcaaatattatacgcaaggcgacaaggtgctgatgccgctggcgattcaggttcatcatgccgtttgtgatggcttccatgtcggcagaatgcttaatgaattacaacagtactgcgatgagtggcagggcggggcgtaaagatctggatccggcttactaaaagccagataacagtatgcgtatttgcgcgctgatttttgcggtataagaatatatactgatatgtatacccgaagtatgtcaaaaagaggtatgctatgaagcagcgtattacagtgacagttgacagcgacagctatcagttgctcaaggcatatatgatgtcaatatctccggtctggtaagcacaaccatgcagaatgaagcccgtcgtctgcgtgccgaacgctggaaagcggaaaatcaggaagggatggctgaggtcgcccggtttattgaaatgaacggctcttttgctgacgagaacaggggctggtgaaatgcagtttaaggtttacacctataaaagagagagccgttatcgtctgtttgtggatgtacagagtgatattattgacacgcccgggcgacggatggtgatccccctggccagtgcacgtctgctgtcagataaagtctcccgtgaactttacccggtggtgcatatcggggatgaaagctggcgcatgatgaccaccgatatggccagtgtgccggtctccgttatcggggaagaagtggctgatctcagccaccgcgaaaatgacatcaaaaacgccattaacctgatgttctggggaatataaatgtcaggctcccttatacacagccagtctgcaggtcgacggtctcgactcacgcctgagcaggtagtggctattgcatccaatggcgggggcagacccgcactggagtcaatcgtggcccagctttcgaggccggaccccgcgctggccgcactcactaatgatcatcttgtagcgctggcctgcctcggcggacgacccgccttggatgcggtgaagaaggggctcccgcacgcgcctgcattgattaagcggaccaacagaaggattcccgagaggacatcacatcgagtggcagatcacgcgcaagtggtccgcgtgctcggattcttccagtgtcactcccaccccgcacaagcgttcgatgacgccatgactcaatttggtatgtcgagacacggactgctgcagctctttcgtagagtcggtgtcacagaactcgaggcccgctcgggcacactgcctcccgcctcccagcggtgggacaggattctccaagcgagcggtatgaaacgcgcgaagccttcacctacgtcaactcagacacctgaccaggcgagccttcatgcgttcgcagactcgctggagagggatttggacgcgccctcgcccatgcatgaaggggaccaaactcgcgcgtcagctagccccaagaagaagagaaaggtggaggccagcggttccggacgggctgacgcattggacgattttgatctggatatgctgggaagtgacgccctcgatgattttgaccttgacatgcttggttcggatgcccttgatgactttgacctcgacatgctcggcagtgacgcccttgatgatttcgacctggacatgctgattaactctagaggcagtggagagggcagaggaagtctgctaacatgcggtgacgtcgaggagaatcctggcccagtgagcaagggcgaggagctgttcaccggggtggtgcccatcctggtcgagctggacggcgacgtaaacggccacaagttcagcgtgtccggcgagggcgagggcgatgccacctacggcaagctgaccctgaagttcatctgcaccaccggcaagctgcccgtgccctggcccaccctcgtgaccaccctgacctacggcgtgcagtgcttcagccgctaccccgaccacatgaagcagcacgacttcttcaagtccgccatgcccgaaggctacgtccaggagcgcaccatcttcttcaaggacgacggcaactacaagacccgcgccgaggtgaagttcgagggcgacaccctggtgaaccgcatcgagctgaagggcatcgacttcaaggaggacggcaacatcctggggcacaagctggagtacaactacaacagccacaacgtctatatcatggccgacaagcagaagaacggcatcaaggtgaacttcaagatccgccacaacatcgaggacggcagcgtgcagctcgccgaccactaccagcagaacacccccatcggcgacggccccgtgctgctgcccgacaaccactacctgagcacccagtccgccctgagcaaagaccccaacgagaagcgcgatcacatggtcctgctggagttcgtgaccgccgccgggatcactctcggcatggacgagctgtacaagtaa

SEQ ID NO: 4498 - DNA, 3782 bp, synthetic construct
  misc_feature 1..3782: note = Nucleic Acid sequence of pTALE-TF (NN)
  source 1..3782: mol_type = other DNA
atgtcgcggacccggctcccttccccacccgcacccagcccagcgttttcggccgactcgttctcagacctgcttaggcagttcgacccctcactgtttaacacatcgttgttcgactcccttcctccgtttggggcgcaccatacggaggcggccaccggggagtgggatgaggtgcagtcgggattgagagctgcggatgcaccacccccaaccatgcgggtggccgtcaccgctgcccgaccgccgagggcgaagcccgcaccaaggcggagggcagcgcaaccgtccgacgcaagccccgcagcgcaagtagatttgagaactttgggatattcacagcagcagcaggaaaagatcaagcccaaagtgaggtcgacagtcgcgcagcatcacgaagcgctggtgggtcatgggtttacacatgcccacatcgtagccttgtcgcagcaccctgcagcccttggcacggtcgccgtcaagtaccaggacatgattgcggcgttgccggaagccacacatgaggcgatcgtcggtgtggggaaacagtggagcggagcccgagcgcttgaggccctgttgacggtcgcgggagagctgagagggcctccccttcagctggacacgggccagttgctgaagatcgcgaagcggggaggagtcacggcggtcgaggcggtgcacgcgtggcgcaatgcgctcacgggagcacccctcaacctgacagagaccgcggccgcattaggcaccccaggctttacactttatgcttccggctcgtataatgtgtggattttgagttaggatccgtcgagattttcaggagctaaggaagctaaaatggagaaaaaaatcactggatataccaccgttgatatatcccaatggcatcgtaaagaacattttgaggcatttcagtcagttgctcaatgtacctataaccagaccgttcagctggatattacggcctttttaaagaccgtaaagaaaaataagcacaagttttatccggcctttattcacattcttgcccgcctgatgaatgctcatccggaattccgtatggcaatgaaagacggtgagctggtgatatgggatagtgttcacccttgttacaccgttttccatgagcaaactgaaacgttttcatcgctctggagtgaataccacgacgatttccggcagtttctacacatatattcgcaagatgtggcgtgttacggtgaaaacctggcctatttccctaaagggtttattgagaatatgtttttcgtctcagccaatccctgggtgagtttcaccagttttgatttaaacgtggccaatatggacaacttcttcgcccccgttttcaccatgggcaaatattatacgcaaggcgacaaggtgctgatgccgctggcgattcaggttcatcatgccgtttgtgatggcttccatgtcggcagaatgcttaatgaattacaacagtactgcgatgagtggcagggcggggcgtaaagatctggatccggcttactaaaagccagataacagtatgcgtatttgcgcgctgatttttgcggtataagaatatatactgatatgtatacccgaagtatgtcaaaaagaggtatgctatgaagcagcgtattacagtgacagttgacagcgacagctatcagttgctcaaggcatatatgatgtcaatatctccggtctggtaagcacaaccatgcagaatgaagcccgtcgtctgcgtgccgaacgctggaaagcggaaaatcaggaagggatggctgaggtcgcccggtttattgaaatgaacggctcttttgctgacgagaacaggggctggtgaaatgcagtttaaggtttacacctataaaagagagagccgttatcgtctgtttgtggatgtacagagtgatattattgacacgcccgggcgacggatggtgatccccctggccagtgcacgtctgctgtcagataaagtctcccgtgaactttacccggtggtgcatatcggggatgaaagctggcgcatgatgaccaccgatatggccagtgtgccggtctccgttatcggggaagaagtggctgatctcagccaccgcgaaaatgacatcaaaaacgccattaacctgatgttctggggaatataaatgtcaggctcccttatacacagccagtctgcaggtcgacggtctcgactcacgcctgagcaggtagtggctattgcatccaataacgggggcagacccgcactggagtcaatcgtggcccagctttcgaggccggaccccgcgctggccgcactcactaatgatcatcttgtagcgctggcctgcctcggcggacgacccgccttggatgcggtgaagaaggggctcccgcacgcgcctgcattgattaagcggaccaacagaaggattcccgagaggacatcacatcgagtggcagatcacgcgcaagtggtccgcgtgctcggattcttccagtgtcactcccaccccgcacaagcgttcgatgacgccatgactcaatttggtatgtcgagacacggactgctgcagctctttcgtagagtcggtgtcacagaactcgaggcccgctcgggcacactgcctcccgcctcccagcggtgggacaggattctccaagcgagcggtatgaaacgcgcgaagccttcacctacgtcaactcagacacctgaccaggcgagccttcatgcgttcgcagactcgctggagagggatttggacgcgccctcgcccatgcatgaaggggaccaaactcgcgcgtcagctagccccaagaagaagagaaaggtggaggccagcggttccggacgggctgacgcattggacgattttgatctggatatgctgggaagtgacgccctcgatgattttgaccttgacatgcttggttcggatgcccttgatgactttgacctcgacatgctcggcagtgacgcccttgatgatttcgacctggacatgctgattaactctagaggcagtggagagggcagaggaagtctgctaacatgcggtgacgtcgaggagaatcctggcccagtgagcaagggcgaggagctgttcaccggggtggtgcccatcctggtcgagctggacggcgacgtaaacggccacaagttcagcgtgtccggcgagggcgagggcgatgccacctacggcaagctgaccctgaagttcatctgcaccaccggcaagctgcccgtgccctggcccaccctcgtgaccaccctgacctacggcgtgcagtgcttcagccgctaccccgaccacatgaagcagcacgacttcttcaagtccgccatgcccgaaggctacgtccaggagcgcaccatcttcttcaaggacgacggcaactacaagacccgcgccgaggtgaagttcgagggcgacaccctggtgaaccgcatcgagctgaagggcatcgacttcaaggaggacggcaacatcctggggcacaagctggagtacaactacaacagccacaacgtctatatcatggccgacaagcagaagaacggcatcaaggtgaacttcaagatccgccacaacatcgaggacggcagcgtgcagctcgccgaccactaccagcagaacacccccatcggcgacggccccgtgctgctgcccgacaaccactacctgagcacccagtccgccctgagcaaagaccccaacgagaagcgcgatcacatggtcctgctggagttcgtgaccgccgccgggatcactctcggcatggacgagctgtacaagtaa

SEQ ID NO: 4499 - DNA, 3782 bp, synthetic construct
  misc_feature 1..3782: note = Nucleic Acid sequence of pTALE-TF (HD)
  source 1..3782: mol_type = other DNA
atgtcgcggacccggctcccttccccacccgcacccagcccagcgttttcggccgactcgttctcagacctgcttaggcagttcgacccctcactgtttaacacatcgttgttcgactcccttcctccgtttggggcgcaccatacggaggcggccaccggggagtgggatgaggtgcagtcgggattgagagctgcggatgcaccacccccaaccatgcgggtggccgtcaccgctgcccgaccgccgagggcgaagcccgcaccaaggcggagggcagcgcaaccgtccgacgcaagccccgcagcgcaagtagatttgagaactttgggatattcacagcagcagcaggaaaagatcaagcccaaagtgaggtcgacagtcgcgcagcatcacgaagcgctggtgggtcatgggtttacacatgcccacatcgtagccttgtcgcagcaccctgcagcccttggcacggtcgccgtcaagtaccaggacatgattgcggcgttgccggaagccacacatgaggcgatcgtcggtgtggggaaacagtggagcggagcccgagcgcttgaggccctgttgacggtcgcgggagagctgagagggcctccccttcagctggacacgggccagttgctgaagatcgcgaagcggggaggagtcacggcggtcgaggcggtgcacgcgtggcgcaatgcgctcacgggagcacccctcaacctgacagagaccgcggccgcattaggcaccccaggctttacactttatgcttccggctcgtataatgtgtggattttgagttaggatccgtcgagattttcaggagctaaggaagctaaaatggagaaaaaaatcactggatataccaccgttgatatatcccaatggcatcgtaaagaacattttgaggcatttcagtcagttgctcaatgtacctataaccagaccgttcagctggatattacggcctttttaaagaccgtaaagaaaaataagcacaagttttatccggcctttattcacattcttgcccgcctgatgaatgctcatccggaattccgtatggcaatgaaagacggtgagctggtgatatgggatagtgttcacccttgttacaccgttttccatgagcaaactgaaacgttttcatcgctctggagtgaataccacgacgatttccggcagtttctacacatatattcgcaagatgtggcgtgttacggtgaaaacctggcctatttccctaaagggtttattgagaatatgtttttcgtctcagccaatccctgggtgagtttcaccagttttgatttaaacgtggccaatatggacaacttcttcgcccccgttttcaccatgggcaaatattatacgcaaggcgacaaggtgctgatgccgctggcgattcaggttcatcatgccgtttgtgatggcttccatgtcggcagaatgcttaatgaattacaacagtactgcgatgagtggcagggcggggcgtaaagatctggatccggcttactaaaagccagataacagtatgcgtatttgcgcgctgatttttgcggtataagaatatatactgatatgtatacccgaagtatgtcaaaaagaggtatgctatgaagcagcgtattacagtgacagttgacagcgacagctatcagttgctcaaggcatatatgatgtcaatatctccggtctggtaagcacaaccatgcagaatgaagcccgtcgtctgcgtgccgaacgctggaaagcggaaaatcaggaagggatggctgaggtcgcccggtttattgaaatgaacggctcttttgctgacgagaacaggggctggtgaaatgcagtttaaggtttacacctataaaagagagagccgttatcgtctgtttgtggatgtacagagtgatattattgacacgcccgggcgacggatggtgatccccctggccagtgcacgtctgctgtcagataaagtctcccgtgaactttacccggtggtgcatatcggggatgaaagctggcgcatgatgaccaccgatatggccagtgtgccggtctccgttatcggggaagaagtggctgatctcagccaccgcgaaaatgacatcaaaaacgccattaacctgatgttctggggaatataaatgtcaggctcccttatacacagccagtctgcaggtcgacggtctcgactcacgcctgagcaggtagtggctattgcatcccatgacgggggcagacccgcactggagtcaatcgtggcccagctttcgaggccggaccccgcgctggccgcactcactaatgatcatcttgtagcgctggcctgcctcggcggacgacccgccttggatgcggtgaagaaggggctcccgcacgcgcctgcattgattaagcggaccaacagaaggattcccgagaggacatcacatcgagtggcagatcacgcgcaagtggtccgcgtgctcggattcttccagtgtcactcccaccccgcacaagcgttcgatgacgccatgactcaatttggtatgtcgagacacggactgctgcagctctttcgtagagtcggtgtcacagaactcgaggcccgctcgggcacactgcctcccgcctcccagcggtgggacaggattctccaagcgagcggtatgaaacgcgcgaagccttcacctacgtcaactcagacacctgaccaggcgagccttcatgcgttcgcagactcgctggagagggatttggacgcgccctcgcccatgcatgaaggggaccaaactcgcgcgtcagctagccccaagaagaagagaaaggtggaggccagcggttccggacgggctgacgcattggacgattttgatctggatatgctgggaagtgacgccctcgatgattttgaccttgacatgcttggttcggatgcccttgatgactttgacctcgacatgctcggcagtgacgcccttgatgatttcgacctggacatgctgattaactctagaggcagtggagagggcagaggaagtctgctaacatgcggtgacgtcgaggagaatcctggcccagtgagcaagggcgaggagctgttcaccggggtggtgcccatcctggtcgagctggacggcgacgtaaacggccacaagttcagcgtgtccggcgagggcgagggcgatgccacctacggcaagctgaccctgaagttcatctgcaccaccggcaagctgcccgtgccctggcccaccctcgtgaccaccctgacctacggcgtgcagtgcttcagccgctaccccgaccacatgaagcagcacgacttcttcaagtccgccatgcccgaaggctacgtccaggagcgcaccatcttcttcaaggacgacggcaactacaagacccgcgccgaggtgaagttcgagggcgacaccctggtgaaccgcatcgagctgaagggcatcgacttcaaggaggacggcaacatcctggggcacaagctggagtacaactacaacagccacaacgtctatatcatggccgacaagcagaagaacggcatcaaggtgaacttcaagatccgccacaacatcgaggacggcagcgtgcagctcgccgaccactaccagcagaacacccccatcggcgacggccccgtgctgctgcccgacaaccactacctgagcacccagtccgccctgagcaaagaccccaacgagaagcgcgatcacatggtcctgctggagttcgtgaccgccgccgggatcactctcggcatggacgagctgtacaagtaa

SEQ ID NO: 4500 - DNA, 2855 bp, synthetic construct
  misc_feature 1..2855: note = Nucleic Acid sequence of pTALEN (NI)
  source 1..2855: mol_type = other DNA
atggactataaggaccacgacggagactacaaggatcatgatattgattacaaagacgatgacgataagatggccccaaagaagaagcggaaggtcggtatccacggagtcccagcagccgtagatttgagaactttgggatattcacagcagcagcaggaaaagatcaagcccaaagtgaggtcgacagtcgcgcagcatcacgaagcgctggtgggtcatgggtttacacatgcccacatcgtagccttgtcgcagcaccctgcagcccttggcacggtcgccgtcaagtaccaggacatgattgcggcgttgccggaagccacacatgaggcgatcgtcggtgtggggaaacagtggagcggagcccgagcgcttgaggccctgttgacggtcgcgggagagctgagagggcctccccttcagctggacacgggccagttgctgaagatcgcgaagcggggaggagtcacggcggtcgaggcggtgcacgcgtggcgcaatgcgctcacgggagcacccctcaacctgacagagaccgcggccgcattaggcaccccaggctttacactttatgcttccggctcgtataatgtgtggattttgagttaggatccgtcgagattttcaggagctaaggaagctaaaatggagaaaaaaatcactggatataccaccgttgatatatcccaatggcatcgtaaagaacattttgaggcatttcagtcagttgctcaatgtacctataaccagaccgttcagctggatattacggcctttttaaagaccgtaaagaaaaataagcacaagttttatccggcctttattcacattcttgcccgcctgatgaatgctcatccggaattccgtatggcaatgaaagacggtgagctggtgatatgggatagtgttcacccttgttacaccgttttccatgagcaaactgaaacgttttcatcgctctggagtgaataccacgacgatttccggcagtttctacacatatattcgcaagatgtggcgtgttacggtgaaaacctggcctatttccctaaagggtttattgagaatatgtttttcgtctcagccaatccctgggtgagtttcaccagttttgatttaaacgtggccaatatggacaacttcttcgcccccgttttcaccatgggcaaatattatacgcaaggcgacaaggtgctgatgccgctggcgattcaggttcatcatgccgtttgtgatggcttccatgtcggcagaatgcttaatgaattacaacagtactgcgatgagtggcagggcggggcgtaaagatctggatccggcttactaaaagccagataacagtatgcgtatttgcgcgctgatttttgcggtataagaatatatactgatatgtatacccgaagtatgtcaaaaagaggtatgctatgaagcagcgtattacagtgacagttgacagcgacagctatcagttgctcaaggcatatatgatgtcaatatctccggtctggtaagcacaaccatgcagaatgaagcccgtcgtctgcgtgccgaacgctggaaagcggaaaatcaggaagggatggctgaggtcgcccggtttattgaaatgaacggctcttttgctgacgagaacaggggctggtgaaatgcagtttaaggtttacacctataaaagagagagccgttatcgtctgtttgtggatgtacagagtgatattattgacacgcccgggcgacggatggtgatccccctggccagtgcacgtctgctgtcagataaagtctcccgtgaactttacccggtggtgcatatcggggatgaaagctggcgcatgatgaccaccgatatggccagtgtgccggtctccgttatcggggaagaagtggctgatctcagccaccgcgaaaatgacatcaaaaacgccattaacctgatgttctggggaatataaatgtcaggctcccttatacacagccagtctgcaggtcgacggtctcgactcacgcctgagcaggtagtggctattgcatccaacatcgggggcagacccgcactggagtcaatcgtggcccagctttcgaggccggaccccgcgctggccgcactcactaatgatcatcttgtagcgctggcctgcctcggcggacgacccgccttggatgcggtgaagaaggggctcccgcacgcgcctgcattgattaagcggaccaacagaaggattcccgagaggacatcacatcgagtggcaggttcccaactcgtgaagagtgaacttgaggagaaaaagtcggagctgcggcacaaattgaaatacgtaccgcatgaatacatcgaacttatcgaaattgctaggaactcgactcaagacagaatccttgagatgaaggtaatggagttctttatgaaggtttatggataccgagggaagcatctcggtggatcacgaaaacccgacggagcaatctatacggtggggagcccgattgattacggagtgatcgtcgacacgaaagcctacagcggtgggtacaatcttcccatcgggcaggcagatgagatgcaacgttatgtcgaagaaaatcagaccaggaacaaacacatcaatccaaatgagtggtggaaagtgtatccttcatcagtgaccgagtttaagtttttgtttgtctctgggcatttcaaaggcaactataaggcccagctcacacggttgaatcacattacgaactgcaatggtgcggttttgtccgtagaggaactgctcattggtggagaaatgatcaaagcgggaactctgacactggaagaagtcagacgcaagtttaacaatggcgagatcaatttccgctcataa

SEQ ID NO: 4501 - DNA, 2855 bp, synthetic construct
  misc_feature 1..2855: note = Nucleic Acid sequence of pTALEN (NG)
  source 1..2855: mol_type = other DNA
atggactataaggaccacgacggagactacaaggatcatgatattgattacaaagacgatgacgataagatggccccaaagaagaagcggaaggtcggtatccacggagtcccagcagccgtagatttgagaactttgggatattcacagcagcagcaggaaaagatcaagcccaaagtgaggtcgacagtcgcgcagcatcacgaagcgctggtgggtcatgggtttacacatgcccacatcgtagccttgtcgcagcaccctgcagcccttggcacggtcgccgtcaagtaccaggacatgattgcggcgttgccggaagccacacatgaggcgatcgtcggtgtggggaaacagtggagcggagcccgagcgcttgaggccctgttgacggtcgcgggagagctgagagggcctccccttcagctggacacgggccagttgctgaagatcgcgaagcggggaggagtcacggcggtcgaggcggtgcacgcgtggcgcaatgcgctcacgggagcacccctcaacctgacagagaccgcggccgcattaggcaccccaggctttacactttatgcttccggctcgtataatgtgtggattttgagttaggatccgtcgagattttcaggagctaaggaagctaaaatggagaaaaaaatcactggatataccaccgttgatatatcccaatggcatcgtaaagaacattttgaggcatttcagtcagttgctcaatgtacctataaccagaccgttcagctggatattacggcctttttaaagaccgtaaagaaaaataagcacaagttttatccggcctttattcacattcttgcccgcctgatgaatgctcatccggaattccgtatggcaatgaaagacggtgagctggtgatatgggatagtgttcacccttgttacaccgttttccatgagcaaactgaaacgttttcatcgctctggagtgaataccacgacgatttccggcagtttctacacatatattcgcaagatgtggcgtgttacggtgaaaacctggcctatttccctaaagggtttattgagaatatgtttttcgtctcagccaatccctgggtgagtttcaccagttttgatttaaacgtggccaatatggacaacttcttcgcccccgttttcaccatgggcaaatattatacgcaaggcgacaaggtgctgatgccgctggcgattcaggttcatcatgccgtttgtgatggcttccatgtcggcagaatgcttaatgaattacaacagtactgcgatgagtggcagggcggggcgtaaagatctggatccggcttactaaaagccagataacagtatgcgtatttgcgcgctgatttttgcggtataagaatatatactgatatgtatacccgaagtatgtcaaaaagaggtatgctatgaagcagcgtattacagtgacagttgacagcgacagctatcagttgctcaaggcatatatgatgtcaatatctccggtctggtaagcacaaccatgcagaatgaagcccgtcgtctgcgtgccgaacgctggaaagcggaaaatcaggaagggatggctgaggtcgcccggtttattgaaatgaacggctcttttgctgacgagaacaggggctggtgaaatgcagtttaaggtttacacctataaaagagagagccgttatcgtctgtttgtggatgtacagagtgatattattgacacgcccgggcgacggatggtgatccccctggccagtgcacgtctgctgtcagataaagtctcccgtgaactttacccggtggtgcatatcggggatgaaagctggcgcatgatgaccaccgatatggccagtgtgccggtctccgttatcggggaagaagtggctgatctcagccaccgcgaaaatgacatcaaaaacgccattaacctgatgttctggggaatataaatgtcaggctcccttatacacagccagtctgcaggtcgacggtctcgactcacgcctgagcaggtagtggctattgcatccaacggagggggcagacccgcactggagtcaatcgtggcccagctttcgaggccggaccccgcgctggccgcactcactaatgatcatcttgtagcgctggcctgcctcggcggacgacccgccttggatgcggtgaagaaggggctcccgcacgcgcctgcattgattaagcggaccaacagaaggattcccgagaggacatcacatcgagtggcaggttcccaactcgtgaagagtgaacttgaggagaaaaagtcggagctgcggcacaaattgaaatacgtaccgcatgaatacatcgaacttatcgaaattgctaggaactcgactcaagacagaatccttgagatgaaggtaatggagttctttatgaaggtttatggataccgagggaagcatctcggtggatcacgaaaacccgacggagcaatctatacggtggggagcccgattgattacggagtgatcgtcgacacgaaagcctacagcggtgggtacaatcttcccatcgggcaggcagatgagatgcaacgttatgtcgaagaaaatcagaccaggaacaaacacatcaatccaaatgagtggtggaaagtgtatccttcatcagtgaccgagtttaagtttttgtttgtctctgggcatttcaaaggcaactataaggcccagctcacacggttgaatcacattacgaactgcaatggtgcggttttgtccgtagaggaactgctcattggtggagaaatgatcaaagcgggaactctgacactggaagaagtcagacgcaagtttaacaatggcgagatcaatttccgctcataa

SEQ ID NO: 4502 - DNA, 2855 bp, synthetic construct
  misc_feature 1..2855: note = Nucleic Acid sequence of pTALEN (NN)
  source 1..2855: mol_type = other DNA
atggactataaggaccacgacggagactacaaggatcatgatattgattacaaagacgatgacgataagatggccccaaagaagaagcggaaggtcggtatccacggagtcccagcagccgtagatttgagaactttgggatattcacagcagcagcaggaaaagatcaagcccaaagtgaggtcgacagtcgcgcagcatcacgaagcgctggtgggtcatgggtttacacatgcccacatcgtagccttgtcgcagcaccctgcagcccttggcacggtcgccgtcaagtaccaggacatgattgcggcgttgccggaagccacacatgaggcgatcgtcggtgtggggaaacagtggagcggagcccgagcgcttgaggccctgttgacggtcgcgggagagctgagagggcctccccttcagctggacacgggccagttgctgaagatcgcgaagcggggaggagtcacggcggtcgaggcggtgcacgcgtggcgcaatgcgctcacgggagcacccctcaacctgacagagaccgcggccgcattaggcaccccaggctttacactttatgcttccggctcgtataatgtgtggattttgagttaggatccgtcgagattttcaggagctaaggaagctaaaatggagaaaaaaatcactggatataccaccgttgatatatcccaatggcatcgtaaagaacattttgaggcatttcagtcagttgctcaatgtacctataaccagaccgttcagctggatattacggcctttttaaagaccgtaaagaaaaataagcacaagttttatccggcctttattcacattcttgcccgcctgatgaatgctcatccggaattccgtatggcaatgaaagacggtgagctggtgatatgggatagtgttcacccttgttacaccgttttccatgagcaaactgaaacgttttcatcgctctggagtgaataccacgacgatttccggcagtttctacacatatattcgcaagatgtggcgtgttacggtgaaaacctggcctatttccctaaagggtttattgagaatatgtttttcgtctcagccaatccctgggtgagtttcaccagttttgatttaaacgtggccaatatggacaacttcttcgcccccgttttcaccatgggcaaatattatacgcaaggcgacaaggtgctgatgccgctggcgattcaggttcatcatgccgtttgtgatggcttccatgtcggcagaatgcttaatgaattacaacagtactgcgatgagtggcagggcggggcgtaaagatctggatccggcttactaaaagccagataacagtatgcgtatttgcgcgctgatttttgcggtataagaatatatactgatatgtatacccgaagtatgtcaaaaagaggtatgctatgaagcagcgtattacagtgacagttgacagcgacagctatcagttgctcaaggcatatatgatgtcaatatctccggtctggtaagcacaaccatgcagaatgaagcccgtcgtctgcgtgccgaacgctggaaagcggaaaatcaggaagggatggctgaggtcgcccggtttattgaaatgaacggctcttttgctgacgagaacaggggctggtgaaatgcagtttaaggtttacacctataaaagagagagccgttatcgtctgtttgtggatgtacagagtgatattattgacacgcccgggcgacggatggtgatccccctggccagtgcacgtctgctgtcagataaagtctcccgtgaactttacccggtggtgcatatcggggatgaaagctggcgcatgatgaccaccgatatggccagtgtgccggtctccgttatcggggaagaagtggctgatctcagccaccgcgaaaatgacatcaaaaacgccattaacctgatgttctggggaatataaatgtcaggctcccttatacacagccagtctgcaggtcgacggtctcgactcacgcctgagcaggtagtggctattgcatccaacaacgggggcagacccgcactggagtcaatcgtggcccagctttcgaggccggaccccgcgctggccgcactcactaatgatcatcttgtagcgctggcctgcctcggcggacgacccgccttggatgcggtgaagaaggggctcccgcacgcgcctgcattgattaagcggaccaacagaaggattcccgagaggacatcacatcgagtggcaggttcccaactcgtgaagagtgaacttgaggagaaaaagtcggagctgcggcacaaattgaaatacgtaccgcatgaatacatcgaacttatcgaaattgctaggaactcgactcaagacagaatccttgagatgaaggtaatggagttctttatgaaggtttatggataccgagggaagcatctcggtggatcacgaaaacccgacggagcaatctatacggtggggagcccgattgattacggagtgatcgtcgacacgaaagcctacagcggtgggtacaatcttcccatcgggcaggcagatgagatgcaacgttatgtcgaagaaaatcagaccaggaacaaacacatcaatccaaatgagtggtggaaagtgtatccttcatcagtgaccgagtttaagtttttgtttgtctctgggcatttcaaaggcaactataaggcccagctcacacggttgaatcacattacgaactgcaatggtgcggttttgtccgtagaggaactgctcattggtggagaaatgatcaaagcgggaactctgacactggaagaagtcagacgcaagtttaacaatggcgagatcaatttccgctcataa

SEQ ID NO: 4503 - DNA, 2855 bp, synthetic construct
  misc_feature 1..2855: note = Nucleic Acid sequence of pTALEN (HD)
  source 1..2855: mol_type = other DNA
atggactataaggaccacgacggagactacaaggatcatgatattgattacaaagacgatgacgataagatggccccaaagaagaagcggaaggtcggtatccacggagtcccagcagccgtagatttgagaactttgggatattcacagcagcagcaggaaaagatcaagcccaaagtgaggtcgacagtcgcgcagcatcacgaagcgctggtgggtcatgggtttacacatgcccacatcgtagccttgtcgcagcaccctgcagcccttggcacggtcgccgtcaagtaccaggacatgattgcggcgttgccggaagccacacatgaggcgatcgtcggtgtggggaaacagtggagcggagcccgagcgcttgaggccctgttgacggtcgcgggagagctgagagggcctccccttcagctggacacgggccagttgctgaagatcgcgaagcggggaggagtcacggcggtcgaggcggtgcacgcgtggcgcaatgcgctcacgggagcacccctcaacctgacagagaccgcggccgcattaggcaccccaggctttacactttatgcttccggctcgtataatgtgtggattttgagttaggatccgtcgagattttcaggagctaaggaagctaaaatggagaaaaaaatcactggatataccaccgttgatatatcccaatggcatcgtaaagaacattttgaggcatttcagtcagttgctcaatgtacctataaccagaccgttcagctggatattacggcctttttaaagaccgtaaagaaaaataagcacaagttttatccggcctttattcacattcttgcccgcctgatgaatgctcatccggaattccgtatggcaatgaaagacggtgagctggtgatatgggatagtgttcacccttgttacaccgttttccatgagcaaactgaaacgttttcatcgctctggagtgaataccacgacgatttccggcagtttctacacatatattcgcaagatgtggcgtgttacggtgaaaacctggcctatttccctaaagggtttattgagaatatgtttttcgtctcagccaatccctgggtgagtttcaccagttttgatttaaacgtggccaatatggacaacttcttcgcccccgttttcaccatgggcaaatattatacgcaaggcgacaaggtgctgatgccgctggcgattcaggttcatcatgccgtttgtgatggcttccatgtcggcagaatgcttaatgaattacaacagtactgcgatgagtggcagggcggggcgtaaagatctggatccggcttactaaaagccagataacagtatgcgtatttgcgcgctgatttttgcggtataagaatatatactgatatgtatacccgaagtatgtcaaaaagaggtatgctatgaagcagcgtattacagtgacagttgacagcgacagctatcagttgctcaaggcatatatgatgtcaatatctccggtctggtaagcacaaccatgcagaatgaagcccgtcgtctgcgtgccgaacgctggaaagcggaaaatcaggaagggatggctgaggtcgcccggtttattgaaatgaacggctcttttgctgacgagaacaggggctggtgaaatgcagtttaaggtttacacctataaaagagagagccgttatcgtctgtttgtggatgtacagagtgatattattgacacgcccgggcgacggatggtgatccccctggccagtgcacgtctgctgtcagataaagtctcccgtgaactttacccggtggtgcatatcggggatgaaagctggcgcatgatgaccaccgatatggccagtgtgccggtctccgttatcggggaagaagtggctgatctcagccaccgcgaaaatgacatcaaaaacgccattaacctgatgttctggggaatataaatgtcaggctcccttatacacagccagtctgcaggtcgacggtctcgactcacgcctgagcaggtagtggctattgcatcccatgacgggggcagacccgcactggagtcaatcgtggcccagctttcgaggccggaccccgcgctggccgcactcactaatgatcatcttgtagcgctggcctgcctcggcggacgacccgccttggatgcggtgaagaaggggctcccgcacgcgcctgcattgattaagcggaccaacagaaggattcccgagaggacatcacatcgagtggcaggttcccaactcgtgaagagtgaacttgaggagaaaaagtcggagctgcggcacaaattgaaatacgtaccgcatgaatacatcgaacttatcgaaattgctaggaactcgactcaagacagaatccttgagatgaaggtaatggagttctttatgaaggtttatggataccgagggaagcatctcggtggatcacgaaaacccgacggagcaatctatacggtggggagcccgattgattacggagtgatcgtcgacacgaaagcctacagcggtgggtacaatcttcccatcgggcaggcagatgagatgcaacgttatgtcgaagaaaatcagaccaggaacaaacacatcaatccaaatgagtggtggaaagtgtatccttcatcagtgaccgagtttaagtttttgtttgtctctgggcatttcaaaggcaactataaggcccagctcacacggttgaatcacattacgaactgcaatggtgcggttttgtccgtagaggaactgctcattggtggagaaatgatcaaagcgggaactctgacactggaagaagtcagacgcaagtttaacaatggcgagatcaatttccgctcataa

SEQ ID NO: 4504 - DNA, 102 bp, synthetic construct
  misc_feature 1..102: note = Nucleic Acid sequence of TALE NH monomer
  source 1..102: mol_type = other DNA
ctgaccccagagcaggtcgtggcaattgcgagcaaccacgggggaaagcaggcactcgaaaccgtccagaggttgctgcctgtgctgtgccaagcgcacgga

SEQ ID NO: 4505 - skipped

SEQ ID NO: 4506 - DNA, 7098 bp, synthetic construct
  misc_feature 1..7098: note = Nucleic Acid sequence of TALE_Nuc_TACGTACG
  misc_feature 2..805: note = pUC_ori
  misc_feature 1454..2054: note = CMV_Promoter
  misc_feature 2113..2232: note = NLS
  misc_feature 2233..2640: note = TAL_N-Term
  misc_feature 2641..2742: note = Tandem_Repeats "Repeat 1: NI"
  misc_feature 2743..2844: note = Tandem_Repeats "Repeat 2: HD"
  misc_feature 2845..2946: note = Tandem_Repeats "Repeat 3: NN"
  misc_feature 2947..3048: note = Tandem_Repeats "Repeat 4: NG"
  misc_feature 3049..3150: note = Tandem_Repeats "Repeat 5: NI"
  misc_feature 3151..3252: note = Tandem_Repeats "Repeat 6: HD"
  misc_feature 3253..3312: note = Half_Repeat
  misc_feature 3313..3501: note = TAL_C-term
  misc_feature 3502..4104: note = Fok1
  misc_feature 4342..4685: note = SV40_ori
  misc_feature 4731..5756: note = Hygromycin
  misc_feature 5884..6014: note = SV40_pA_Signal
  misc_feature 6069..6917: note = Ampicillin (complement strand)
  source 1..7098: mol_type = other DNA
ctcatgaccaaaatcccttaacgtgagttacgcgcgcgtcgttccactgagcgtcagaccccgtagaaaagatcaaaggatcttcttgagatcctttttttctgcgcgtaatctgctgcttgcaaacaaaaaaaccaccgctaccagcggtggtttgtttgccggatcaagagctaccaactctttttccgaaggtaactggcttcagcagagcgcagataccaaatactgttcttctagtgtagccgtagttagcccaccacttcaagaactctgtagcaccgcctacatacctcgctctgctaatcctgttaccagtggctgctgccagtggcgataagtcgtgtcttaccgggttggactcaagacgatagttaccggataaggcgcagcggtcgggctgaacggggggttcgtgcacacagcccagcttggagcgaacgacctacaccgaactgagatacctacagcgtgagctatgagaaagcgccacgcttcccgaagggagaaaggcggacaggtatccggtaagcggcagggtcggaacaggagagcgcacgagggagcttccagggggaaacgcctggtatctttatagtcctgtcgggtttcgccacctctgacttgagcgtcgatttttgtgatgctcgtcaggggggcggagcctatggaaaaacgccagcaacgcggcctttttacggttcctggccttttgctggccttttgctcacatgttctttcctgcgttatcccctgattctgtggataaccgtattaccgcctttgagtgagctgataccgctcgccgcagccgaacgaccgagcgcagcgagtcagtgagcgaggaagcggaaggcgagagtagggaactgccaggcatcaaactaagcagaaggcccctgacggatggcctttttgcgtttctacaaactctttctgtgttgtaaaacgacggccagtcttaagctcgggccccctgggcggttctgataacgagtaatcgttaatccgcaaataacgtaaaaacccgcttcggcgggtttttttatggggggagtttagggaaagagcatttgtcagaatatttaagggcgcctgtcactttgcttgatatatgagaattatttaaccttataaatgagaaaaaagcaacgcactttaaataagatacgttgctttttcgattgatgaacacctataattaaactattcatctattatttatgattttttgtatatacaatatttctagtttgttaaagagaattaagaaaataaatctcgaaaataataaagggaaaatcagtttttgatatcaaaattatacatgtcaacgataatacaaaatataatacaaactataagatgttatcagtatttattatcatttagaataaattttgtgtcgcccttaattgtgagcggataacaattacgagcttcatgcacagtggcgttgacattgattattgactagttattaatagtaatcaattacggggtcattagttcatagcccatatatggagttccgcgttacataacttacggtaaatggcccgcctggctgaccgcccaacgacccccgcccattgacgtcaataatgacgtatgttcccatagtaacgccaatagggactttccattgacgtcaatgggtggagtatttacggtaaactgcccacttggcagtacatcaagtgtatcatatgccaagtacgccccctattgacgtcaatgacggtaaatggcccgcctggcattatgcccagtacatgaccttatgggactttcctacttggcagtacatctacgtattagtcatcgctattaccatggtgatgcggttttggcagtacatcaatgggcgtggatagcggtttgactcacggggatttccaagtctccaccccattgacgtcaatgggagtttgttttggcaccaaaatcaacgggactttccaaaatgtcgtaacaactccgccccattgacgcaaatgggcggtaggcgtgtacggtgggaggtctatataagcagagctctctggctaactagagaacccactgcttactggcttatcgaaattaatacgactcactataggggccaccatggactataaggaccacgacggagactacaaggatcatgatattgattacaaagacgatgacgataagatggccccaaagaagaagcggaaggtcggtatccacggagtcccagcagccgtagatttgagaactttgggatattcacagcagcagcaggaaaagatcaagcccaaagtgaggtcgacagtcgcgcagcatcacgaagcgctggtgggtcatgggtttacacatgcccacatcgtagccttgtcgcagcaccctgcagcccttggcacggtcgccgtcaagtaccaggacatgattgcggcgttgccggaagccacacatgaggcgatcgtcggtgtggggaaacagtggagcggagcccgagcgcttgaggccctgttgacggtcgcgggagagctgagagggcctccccttcagctggacacgggccagttgctgaagatcgcgaagcggggaggagtcacggcggtcgaggcggtgcacgcgtggcgcaatgcgctcacgggagcacccctcaacctgaccccagagcaggtcgtggcaattgcgagcaacatcgggggaaagcaggcactcgaaaccgtccagaggttgctgcctgtgctgtgccaagcgcacggactaaccccagagcaggtcgtggcaattgcgagccatgacgggggaaagcaggcactcgaaaccgtccagaggttgctgcctgtgctgtgccaagcgcacggattgaccccagagcaggtcgtggcaattgcgagcaacaacgggggaaagcaggcactcgaaaccgtccagaggttgctgcctgtgctgtgccaagcgcacgggctgaccccagagcaggtcgtggcaattgcgagcaacggagggggaaagcaggcactcgaaaccgtccagaggttgctgcctgtgctgtgccaagcgcacggcctgacaccagagcaggtcgtggcaattgcgagcaacatcgggggaaagcaggcactcgaaaccgtccagaggttgctgcctgtgctgtgccaagcgcacggactcaccccagagcaggtcgtggcaattgcgagccatgacgggggaaagcaggcactcgaaaccgtccagaggttgctgcctgtgctgtgccaagcgcacggcctcacgcctgagcaggtagtggctattgcatccaacaacgggggcagacccgcactggagtcaatcgtggcccagctttcgaggccggaccccgcgctggccgcactcactaatgatcatcttgtagcgctggcctgcctcggcggacgacccgccttggatgcggtgaagaaggggctcccgcacgcgcctgcattgattaagcggaccaacagaaggattcccgagaggacatcacatcgagtggcaggttcccaactcgtgaagagtgaacttgaggagaaaaagtcggagctgcggcacaaattgaaatacgtaccgcatgaatacatcgaacttatcgaaattgctaggaactcgactcaagacagaatccttgagatgaaggtaatggagttctttatgaaggtttatggataccgagggaagcatctcggtggatcacgaaaacccgacggagcaatctatacggtggggagcccgattgattacggagtgatcgtcgacacgaaagcctacagcggtgggtacaatcttcccatcgggcaggcagatgagatgcaacgttatgtcgaagaaaatcagaccaggaacaaacacatcaatccaaatgagtggtggaaagtgtatccttcatcagtgaccgagtttaagtttttgtttgtctctgggcatttcaaaggcaactataaggcccagctcacacggttgaatcacattacgaactgcaatggtgcggttttgtccgtagaggaactgctcattggtggagaaatgatcaaagcgggaactctgacactggaagaagtcagacgcaagtttaacaatggcgagatcaatttccgctcataaaaaatcagcctcgactgtgccttctagttgccagccatctgttgtttgcccctcccccgtgccttccttgaccctggaaggtgccactcccactgtcctttcctaataaaatgaggaaattgcatcacaacactcaaccctatctcggtctattcttttgatttataagggattttgccgatttcggcctattggttaaaaaatgagctgatttaacaaaaatttaacgcgaattaattctgtggaatgtgtgtcagttagggtgtggaaagtccccaggctccccagcaggcagaagtatgcaaagcatgcatctcaattagtcagcaaccaggtgtggaaagtccccaggctccccagcaggcagaagtatgcaaagcatgcatctcaattagtcagcaaccatagtcccgcccctaactccgcccatcccgcccctaactccgcccagttccgcccattctccgccccatggctgactaattttttttatttatgcagaggccgaggccgcctctgcctctgagctattccagaagtagtgaggaggcttttttggaggcctaggcttttgcaaaaagctcccgggagcttgtatatccattttcggatctgatcagcacgtgatgaaaaagcctgaactcaccgcgacgtctgtcgagaagtttctgatcgaaaagttcgacagcgtctccgacctgatgcagctctcggagggcgaagaatctcgtgctttcagcttcgatgtaggagggcgtggatatgtcctgcgggtaaatagctgcgccgatggtttctacaaagatcgttatgtttatcggcactttgcatcggccgcgctcccgattccggaagtgcttgacattggggaattcagcgagagcctgacctattgcatctcccgccgtgcacagggtgtcacgttgcaagacctgcctgaaaccgaactgcccgctgttctgcagccggtcgcggaggccatggatgcgatcgctgcggccgatcttagccagacgagcgggttcggcccattcggaccgcaaggaatcggtcaatacactacatggcgtgatttcatatgcgcgattgctgatccccatgtgtatcactggcaaactgtgatggacgacaccgtcagtgcgtccgtcgcgcaggctctcgatgagctgatgctttgggccgaggactgccccgaagtccggcacctcgtgcacgcggatttcggctccaacaatgtcctgacggacaatggccgcataacagcggtcattgactggagcgaggcgatgttcggggattcccaatacgaggtcgccaacatcttcttctggaggccgtggttggcttgtatggagcagcagacgcgctacttcgagcggaggcatccggagcttgcaggatcgccgcggctccgggcgtatatgctccgcattggtcttgaccaactctatcagagcttggttgacggcaatttcgatgatgcagcttgggcgcagggtcgatgcgacgcaatcgtccgatccggagccgggactgtcgggcgtacacaaatcgcccgcagaagcgcggccgtctggaccgatggctgtgtagaagtactcgccgatagtggaaaccgacgccccagcactcgtccgagggcaaaggaatagcacgtgctacgagatttcgattccaccgccgccttctatgaaaggttgggcttcggaatcgttttccgggacgccggctggatgatcctccagcgcggggatctcatgctggagttcttcgcccaccccaacttgtttattgcagcttataatggttacaaataaagcaatagcatcacaaatttcacaaataaagcatttttttcactgcattctagttgtggtttgtccaaactcatcaatgtatcttatcatgtctgtataccgtcgacctctagctagagcttggcgtaatcatggtcattaccaatgcttaatcagtgaggcacctatctcagcgatctgtctatttcgttcatccatagttgcctgactccccgtcgtgtagataactacgatacgggagggcttaccatctggccccagcgctgcgatgataccgcgagaaccacgctcaccggctccggatttatcagcaataaaccagccagccggaagggccgagcgcagaagtggtcctgcaactttatccgcctccatccagtctattaattgttgccgggaagctagagtaagtagttcgccagttaatagtttgcgcaacgttgttgccatcgctacaggcatcgtggtgtcacgctcgtcgtttggtatggcttcattcagctccggttcccaacgatcaaggcgagttacatgatcccccatgttgtgcaaaaaagcggttagctccttcggtcctccgatcgttgtcagaagtaagttggccgcagtgttatcactcatggttatggcagcactgcataattctcttactgtcatgccatccgtaagatgcttttctgtgactggtgagtactcaaccaagtcattctgagaatagtgtatgcggcgaccgagttgctcttgcccggcgtcaatacgggataataccgcgccacatagcagaactttaaaagtgctcatcattggaaaacgttcttcggggcgaaaactctcaaggatcttaccgctgttgagatccagttcgatgtaacccactcgtgcacccaactgatcttcagcatcttttactttcaccagcgtttctgggtgagcaaaaacaggaaggcaaaatgccgcaaaaaagggaataagggcgacacggaaatgttgaatactcatattcttcctttttcaatattattgaagcatttatcagggttattgtctcatgagcggatacatatttgaatgtatttagaaaaataaacaaataggggtcagtgttacaaccaattaaccaattctgaacattatcgcgagcccatttatacctgaatatggctcataacaccccttg

SEQ ID NO: 4507 - DNA, 7947 bp, synthetic construct
  misc_feature 1..7947: note = Nucleic Acid sequence of TALE_TF_TACGTACG
  misc_feature 2..805: note = pUC_ori
  misc_feature 1454..2054: note = CMV_Promoter
  misc_feature 2120..2839: note = TAL_N-Term
  misc_feature 2840..2941: note = Tandem_Repeats "Repeat 1: NI"
  misc_feature 2942..3043: note = Tandem_Repeats "Repeat 2: HD"
  misc_feature 3044..3145: note = Tandem_Repeats "Repeat 3: NN"
  misc_feature 3146..3247: note = Tandem_Repeats "Repeat 4: NG"
  misc_feature 3248..3349: note = Tandem_Repeats "Repeat 5: NI"
  misc_feature 3350..3451: note = Tandem_Repeats "Repeat 6: HD"
  misc_feature 3452..3511: note = Half_Repeat
  misc_feature 3512..4045: note = TAL_C-term
  misc_feature 4049..4051: note = NLS_(SPKKKRKVEA)
  misc_feature 4052..4222: note = VP64_AD
  misc_feature 4229..4291: note = 22A
  misc_feature 4292..5005: note = EGFP
  misc_feature 5641..6666: note = Hygromycin
  misc_feature 6794..6924: note = SV40_pA_Signal
  misc_feature 6979..7827: note = Ampicillin (complement strand)
  source 1..7947: mol_type = other DNA
ctcatgaccaaaatcccttaacgtgagttacgcgcgcgtcgttccactgagcgtcagaccccgtagaaaagatcaaaggatcttcttgagatcctttttttctgcgcgtaatctgctgcttgcaaacaaaaaaaccaccgctaccagcggtggtttgtttgccggatcaagagctaccaactctttttccgaaggtaactggcttcagcagagcgcagataccaaatactgttcttctagtgtagccgtagttagcccaccacttcaagaactctgtagcaccgcctacatacctcgctctgctaatcctgttaccagtggctgctgccagtggcgataagtcgtgtcttaccgggttggactcaagacgatagttaccggataaggcgcagcggtcgggctgaacggggggttcgtgcacacagcccagcttggagcgaacgacctacaccgaactgagatacctacagcgtgagctatgagaaagcgccacgcttcccgaagggagaaaggcggacaggtatccggtaagcggcagggtcggaacaggagagcgcacgagggagcttccagggggaaacgcctggtatctttatagtcctgtcgggtttcgccacctctgacttgagcgtcgatttttgtgatgctcgtcaggggggcggagcctatggaaaaacgccagcaacgcggcctttttacggttcctggccttttgctggccttttgctcacatgttctttcctgcgttatcccctgattctgtggataaccgtattaccgcctttgagtgagctgataccgctcgccgcagccgaacgaccgagcgcagcgagtcagtgagcgaggaagcggaaggcgagagtagggaactgccaggcatcaaactaagcagaaggcccctgacggatggcctttttgcgtttctacaaactctttctgtgttgtaaaacgacggccagtcttaagctcgggccccctgggcggttctgataacgagtaatcgttaatccgcaaataacgtaaaaacccgcttcggcgggtttttttatggggggagtttagggaaagagcatttgtcagaatatttaagggcgcctgtcactttgcttgatatatgagaattatttaaccttataaatgagaaaaaagcaacgcactttaaataagatacgttgctttttcgattgatgaacacctataattaaactattcatctattatttatgattttttgtatatacaatatttctagtttgttaaagagaattaagaaaataaatctcgaaaataataaagggaaaatcagtttttgatatcaaaattatacatgtcaacgataatacaaaatataatacaaactataagatgttatcagtatttattatcatttagaataaattttgtgtcgcccttaattgtgagcggataacaattacgagcttcatgcacagtggcgttgacattgattattgactagttattaatagtaatcaattacggggtcattagttcatagcccatatatggagttccgcgttacataacttacggtaaatggcccgcctggctgaccgcccaacgacccccgcccattgacgtcaataatgacgtatgttcccatagtaacgccaatagggactttccattgacgtcaatgggtggagtatttacggtaaactgcccacttggcagtacatcaagtgtatcatatgccaagtacgccccctattgacgtcaatgacggtaaatggcccgcctggcattatgcccagtacatgaccttatgggactttcctacttggcagtacatctacgtattagtcatcgctattaccatggtgatgcggttttggcagtacatcaatgggcgtggatagcggtttgactcacggggatttccaagtctccaccccattgacgtcaatgggagtttgttttggcaccaaaatcaacgggactttccaaaatgtcgtaacaactccgccccattgacgcaaatgggcggtaggcgtgtacggtgggaggtctatataagcagagctctctggctaactagagaacccactgcttactggcttatcgaaattaatacgactcactataggggcgtacggccaccatgtcgcggacccggctcccttccccacccgcacccagcccagcgttttcggccgactcgttctcagacctgcttaggcagttcgacccctcactgtttaacacatcgttgttcgactcccttcctccgtttggggcgcaccatacggaggcggccaccggggagtgggatgaggtgcagtcgggattgagagctgcggatgcaccacccccaaccatgcgggtggccgtcaccgctgcccgaccgccgagggcgaagcccgcaccaaggcggagggcagcgcaaccgtccgacgcaagccccgcagcgcaagtagatttgagaactttgggatattcacagcagcagcaggaaaagatcaagcccaaagtgaggtcgacagtcgcgcagcatcacgaagcgctggtgggtcatgggtttacacatgcccacatcgtagccttgtcgcagcaccctgcagcccttggcacggtcgccgtcaagtaccaggacatgattgcggcgttgccggaagccacacatgaggcgatcgtcggtgtggggaaacagtggagcggagcccgagcgcttgaggccctgttgacggtcgcgggagagctgagagggcctccccttcagctggacacgggctgaccccagagcaggtcgtggcaattgcgagcaacatcgggggaaagcaggcactcgaaaccgtccagaggttgctgcctgtgctgtgccaagcgcacggactaaccccagagcaggtcgtggcaattgcgagccatgacgggggaaagcaggcactcgaaaccgtccagaggttgctgcctgtgctgtgccaagcgcacggattgaccccagagcaggtcgtggcaattgcgagcaacaacgggggaaagcaggcactcgaaaccgtccagaggttgctgcctgtgctgtgccaagcgcacgggctgaccccagagcaggtcgtggcaattgcgagcaacggagggggaaagcaggcactcgaaaccgtccagaggttgctgcctgtgctgtgccaagcgcacggcctgacaccagagcaggtcgtggcaattgcgagcaacatcgggggaaagcaggcactcgaaaccgtccagaggttgctgcctgtgctgtgccaagcgcacggactcaccccagagcaggtcgtggcaattgcgagccatgacgggggaaagcaggcactcgaaaccgtccagaggttgctgcctgtgctgtgccaagcgcacggcctcacgcctgagcaggtagtggctattgcatccaataacgggggcagacccgcactggagtcaatcgtggcccagctttcgaggccggaccccgcgctggccgcactcactaatgatcatcttgtagcgctggcctgcctcggcggacgacccgccttggatgcggtgaagaaggggctcccgcacgcgcctgcattgattaagcggaccaacagaaggattcccgagaggacatcacatcgagtggcagatcacgcgcaagtggtccgcgtgctcggattcttccagtgtcactcccaccccgcacaagcgttcgatgacgccatgactcaatttggtatgtcgagacacggactgctgcagctctttcgtagagtcggtgtcacagaactcgaggcccgctcgggcacactgcctcccgcctcccagcggtgggacaggattctccaagcgagcggtatgaaacgcgcgaagccttcacctacgtcaactcagacacctgaccaggcgagccttcatgcgttcgcagactcgctggagagggatttggacgcgccctcgcccatgcatgaaggggaccaaactcgcgcgtcagctagccccaagaagaagagaaaggtggaggccagcggttccggacgggctgacgcattggacgattttgatctggatatgctgggaagtgacgccctcgatgattttgaccttgacatgcttggttcggatgcccttgatgactttgacctcgacatgctcggcagtgacgcccttgatgatttcgacctggacatgctgattaactctagaggcagtggagagggcagaggaagtctgctaacatgcggtgacgtcgaggagaatcctggcccagtgagcaagggcgaggagctgttcaccggggtggtgcccatcctggtcgagctggacggcgacgtaaacggccacaagttcagcgtgtccggcgagggcgagggcgatgccacctacggcaagctgaccctgaagttcatctgcaccaccggcaagctgcccgtgccctggcccaccctcgtgaccaccctgacctacggcgtgcagtgcttcagccgctaccccgaccacatgaagcagcacgacttcttcaagtccgccatgcccgaaggctacgtccaggagcgcaccatcttcttcaaggacgacggcaactacaagacccgcgccgaggtgaagttcgagggcgacaccctggtgaaccgcatcgagctgaagggcatcgacttcaaggaggacggcaacatcctggggcacaagctggagtacaactacaacagccacaacgtctatatcatggccgacaagcagaagaacggcatcaaggtgaacttcaagatccgccacaacatcgaggacggcagcgtgcagctcgccgaccactaccagcagaacacccccatcggcgacggccccgtgctgctgcccgacaaccactacctgagcacccagtccgccctgagcaaagaccccaacgagaagcgcgatcacatggtcctgctggagttcgtgaccgccgccgggatcactctcggcatggacgagctgtacaagtaagaattcaaaatcagcctcgactgtgccttctagttgccagccatctgttgtttgcccctcccccgtgccttccttgaccctggaaggtgccactcccactgtcctttcctaataaaatgaggaaattgcatcacaacactcaaccctatctcggtctattcttttgatttataagggattttgccgatttcggcctattggttaaaaaatgagctgatttaacaaaaatttaacgcgaattaattctgtggaatgtgtgtcagttagggtgtggaaagtccccaggctccccagcaggcagaagtatgcaaagcatgcatctcaattagtcagcaaccaggtgtggaaagtccccaggctccccagcaggcagaagtatgcaaagcatgcatctcaattagtcagcaaccatagtcccgcccctaactccgcccatcccgcccctaactccgcccagttccgcccattctccgccccatggctgactaattttttttatttatgcagaggccgaggccgcctctgcctctgagctattccagaagtagtgaggaggcttttttggaggcctaggcttttgcaaaaagctcccgggagcttgtatatccattttcggatctgatcagcacgtgatgaaaaagcctgaactcaccgcgacgtctgtcgagaagtttctgatcgaaaagttcgacagcgtctccgacctgatgcagctctcggagggcgaagaatctcgtgctttcagcttcgatgtaggagggcgtggatatgtcctgcgggtaaatagctgcgccgatggtttctacaaagatcgttatgtttatcggcactttgcatcggccgcgctcccgattccggaagtgcttgacattggggaattcagcgagagcctgacctattgcatctcccgccgtgcacagggtgtcacgttgcaagacctgcctgaaaccgaactgcccgctgttctgcagccggtcgcggaggccatggatgcgatcgctgcggccgatcttagccagacgagcgggttcggcccattcggaccgcaaggaatcggtcaatacactacatggcgtgatttcatatgcgcgattgctgatccccatgtgtatcactggcaaactgtgatggacgacaccgtcagtgcgtccgtcgcgcaggctctcgatgagctgatgctttgggccgaggactgccccgaagtccggcacctcgtgcacgcggatttcggctccaacaatgtcctgacggacaatggccgcataacagcggtcattgactggagcgaggcgatgttcggggattcccaatacgaggtcgccaacatcttcttctggaggccgtggttggcttgtatggagcagcagacgcgctacttcgagcggaggcatccggagcttgcaggatcgccgcggctccgggcgtatatgctccgcattggtcttgaccaactctatcagagcttggttgacggcaatttcgatgatgcagcttgggcgcagggtcgatgcgacgcaatcgtccgatccggagccgggactgtcgggcgtacacaaatcgcccgcagaagcgcggccgtctggaccgatggctgtgtagaagtactcgccgatagtggaaaccgacgccccagcactcgtccgagggcaaaggaatagcacgtgctacgagatttcgattccaccgccgccttctatgaaaggttgggcttcggaatcgttttccgggacgccggctggatgatcctccagcgcggggatctcatgctggagttcttcgcccaccccaacttgtttattgcagcttataatggttacaaataaagcaatagcatcacaaatttcacaaataaagcatttttttcactgcattctagttgtggtttgtccaaactcatcaatgtatcttatcatgtctgtataccgtcgacctctagctagagcttggcgtaatcatggtcattaccaatgcttaatcagtgaggcacctatctcagcgatctgtctatttcgttcatccatagttgcctgactccccgtcgtgtagataactacgatacgggagggcttaccatctggccccagcgctgcgatgataccgcgagaaccacgctcaccggctccggatttatcagcaataaaccagccagccggaagggccgagcgcagaagtggtcctgcaactttatccgcctccatccagtctattaattgttgccgggaagctagagtaagtagttcgccagttaatagtttgcgcaacgttgttgccatcgctacaggcatcgtggtgtcacgctcgtcgtttggtatggcttcattcagctccggttcccaacgatcaaggcgagttacatgatcccccatgttgtgcaaaaaagcggttagctccttcggtcctccgatcgttgtcagaagtaagttggccgcagtgttatcactcatggttatggcagcactgcataattctcttactgtcatgccatccgtaagatgcttttctgtgactggtgagtactcaaccaagtcattctgagaatagtgtatgcggcgaccgagttgctcttgcccggcgtcaatacgggataataccgcgccacatagcagaactttaaaagtgctcatcattggaaaacgttcttcggggcgaaaactctcaaggatcttaccgctgttgagatccagttcgatgtaacccactcgtgcacccaactgatcttcagcatcttttactttcaccagcgtttctgggtgagcaaaaacaggaaggcaaaatgccgcaaaaaagggaataagggcgacacggaaatgttgaatactcatattcttcctttttcaatattattgaagcatttatcagggttattgtctcatgagcggatacatatttgaatgtatttagaaaaataaacaaataggggtcagtgttacaaccaattaaccaattctgaacattatcgcgagcccatttatacctgaatatggctcataacaccccttg

SEQ ID NO: 4508 - DNA, 102 bp, synthetic construct
  misc_feature 1..102: note = Nucleic Acid sequence of TALE Monomer templates pNI
  source 1..102: mol_type = other DNA
ctcaccccagagcaggtcgtggcaattgcgagcaacatcgggggaaagcaggcactcgaaaccgtccagaggttgctgcctgtgctgtgccaagcgcacgga

SEQ ID NO: 4509 - DNA, 102 bp, synthetic construct
  misc_feature 1..102: note = Nucleic Acid sequence of TALE Monomer templates pNG
  source 1..102: mol_type = other DNA
ctcaccccagagcaggtcgtggcaattgcgagcaacggagggggaaagcaggcactcgaaaccgtccagaggttgctgcctgtgctgtgccaagcgcacgga

SEQ ID NO: 4510 - protein, 282 aa, Homo sapiens
MAMSSGGSGGGVPEQEDSVLFRRGTGQSDDSDIWDDTALIKAYDKAVASFKHALKNGDICETSGKPKTTPKRKPAKKNKSQKKNTAASLQQWKVGDKCSAIWSEDGCIYPATIASIDFKRETCVVVYTGYGNREEQNLSDLLSPICEVANNIEQNAQENENESQVSTDESENSRSPGNKSDNIKPKSAPWNSFLPPPPPMPGPRLGPGKPGLKFNGPPPPPPPPPPHLLSCWLPPFPSGPPIIPPPPPICPDSLDDADALGSMLISWYMSGYHTGYYMEMLA

SEQ ID NO: 4511 - protein, 262 aa, Homo sapiens; identical to SEQ ID NO: 4470

SEQ ID NO: 4512 - protein, 461 aa, Homo sapiens
MWQLTSLLLFVATWGISGTPAPLDSVFSSSERAHQVLRIRKRANSFLEELRHSSLERECIEEICDFEEAKEIFQNVDDTLAFWSKHVDGDQCLVLPLEHPCASLCCGHGTCIDGIGSFSCDCRSGWEGRFCQREVSFLNCSLDNGGCTHYCLEEVGWRRCSCAPGYKLGDDLLQCHPAVKFPCGRPWKRMEKKRSHLKRDTEDQEDQVDPRLIDGKMTRRGDSPWQVVLLDSKKKLACGAVLIHPSWVLTAAHCMDESKKLLVRLGEYDLRRWEKWELDLDIKEVFVHPNYSKSTTDNDIALLHLAQPATLSQTIVPICLPDSGLAERELNQAGQETLVTGWGYHSSREKEAKRNRTFVLNFIKIPVVPHNECSEVMSNMVSENMLCAGILGDRQDACEGDSGGPMVASFHGTWFLVGLVSWGEGCGLLHNYGVYTKVSRYLDWIHGHIRDKEAPQKSWAP

SEQ ID NO: 4513 - protein, 704 aa, Homo sapiens
MARELRALLLWGRRLRPLLRAPALAAVPGGKPILCPRRTTAQLGPRRNPAWSLQAGRLFSTQTAEDKEEPLHSIISSTESVQGSTSKHEFQAETKKLLDIVARSLYSEKEVFIRELISNASDALEKLRHKLVSDGQALPEMEIHLQTNAEKGTITIQDTGIGMTQEELVSNLGTIARSGSKAFLDALQNQAEASSKIIGQFGVGFYSAFMVADRVEVYSRSAAPGSLGYQWLSDGSGVFEIAEASGVRTGTKIIIHLKSDCKEFSSEARVRDVVTKYSNFVSFPLYLNGRRMNTLQAIWMMDPKDVREWQHEEFYRYVAQAHDKPRYTLHYKTDAPLNIRSIFYVPDMKPSMFDVSRELGSSVALYSRKVLIQTKATDILPKWLRFIRGVVDSEDIPLNLSRELLQESALIRKLRDVLQQRLIKFFIDQSKKDAEKYAKFFEDYGLFMREGIVTATEQEVKEDIAKLLRYESSALPSGQLTSLSEYASRMRAGTRNIYYLCAPNRHLAEHSPYYEAMKKKDTEVLFCFEQFDELTLLHLREFDKKKLISVETDIVVDHYKEEKFEDRSPAAECLSEKETEELMAWMRNVLGSRVTNVKVTLRLDTHPAMVTVLEMGAARHFLRMQQLAKTQEERAQLLQPTLEINPRHALIKKLNQLRASEPGLAQLLVDQIYENAMIAAGLVDDPRAMVGRLNELLVKALERH

SEQ ID NO: 4514 - protein, 115 aa, Homo sapiens
MTMRHNWTPDLSPLWVLLLCAHVVTLLVRATPVSQTTTAATASVRSTKDPCPSQPPVFPAAKQCPALEVTWPEVEVPLSWAEGNLAPHPRSPALQPQQSTAAGLRLSTGPAAAQP

SEQ ID NO: 4515 - protein, 194 aa, Homo sapiens
MTMRHNWTPDLSPLWVLLLCAHVVTLLVRATPVSQTTTAATASVRSTKDPCPSQPPVFPAAKQCPALEVTWPEVEVPLNGTLSLSCVACSRFPNFSILYWLGNGSFIEHLPGRLWEGSTSRERGSTGTQLCKALVLEQLTPALHSTNFSCVLVDPEQVVQRHVVLAQLWAGLRATLPPTQEALPSSHSSPQQQG

SEQ ID NO: 4516 - protein, 194 aa, Homo sapiens; identical to SEQ ID NO: 4515

SEQ ID NO: 4517 - protein, 194 aa, Homo sapiens; identical to SEQ ID NO: 4515

SEQ ID NO: 4518 - protein, 194 aa, Homo sapiens; identical to SEQ ID NO: 4515

SEQ ID NO: 4519 - protein, 224 aa, Homo sapiens
MPGGLLLGDVAPNFEANTTVGRIRFHDFLGDSWGILFSHPRDFTPVCTTELGRAAKLAPEFAKRNVKLIALSIDSVEDHLAWSKDINAYNCEEPTEKLPFPIIDDRNRELAILLGMLDPAEKDEKGMPVTARVVFVFGPDKKLKLSILYPATTGRNFDEILRVVISLQLTAEKRVATPVDWKDGDSVMVLPTIPEEEAKKLFPKGVFTKELPSGKKYLRYTPQP

SEQ ID NO: 4520 - protein, 105 aa, Homo sapiens
MVKQIESKTAFQEALDAAGDKLVVVDFSATWCGPCKMIKPFFHSLSEKYSNVIFLEVDVDDCQDVASECEVKCMPTFQFFKKGQKVGEFSGANKEKLEATINELV

SEQ ID NO: 4521 - protein, 952 aa, Homo sapiens
MGVRHPPCSHRLLAVCALVSLATAALLGHILLHDFLLVPRELSGSSPVLEETHPAHQQGASRPGPRDAQAHPGRPRAVPTQCDVPPNSRFDCAPDKAITQEQCEARGCCYIPAKQGLQGAQMGQPWCFFPPSYPSYKLENLSSSEMGYTATLTRTTPTFFPKDILTLRLDVMMETENRLHFTIKDPANRRYEVPLETPHVHSRAPSPLYSVEFSEEPFGVIVRRQLDGRVLLNTTVAPLFFADQFLQLSTSLPSQYITGLAEHLSPLMLSTSWTRITLWNRDLAPTPGANLYGSHPFYLALEDGGSAHGVFLLNSNAMDVVLQPSPALSWRSTGGILDVYIFLGPEPKSVVQQYLDVVGYPFMPPYWGLGFHLCRWGYSSTAITRQVVENMTRAHFPLDVQWNDLDYMDSRRDFTFNKDGFRDFPAMVQELHQGGRRYMMIVDPAISSSGPAGSYRPYDEGLRRGVFITNETGQPLIGKVWPGSTAFPDFTNPTALAWWEDMVAEFHDQVPFDGMWIDMNEPSNFIRGSEDGCPNNELENPPYVPGVVGGTLQAATICASSHQFLSTHYNLHNLYGLTEAIASHRALVKARGTRPFVISRSTFAGHGRYAGHWTGDVWSSWEQLASSVPEILQFNLLGVPLVGADVCGFLGNTSEELCVRWTQLGAFYPFMRNHNSLLSLPQEPYSFSEPAQQAMRKALTLRYALLPHLYTLFHQAHVAGETVARPLFLEFPKDSSTWTVDHQLLWGEALLITPVLQAGKAEVTGYFPLGTWYDLQTVPVEALGSLPPPPAAPREPAIHSEGQWVTLPAPLDTINVHLRAGYIIPLQGPGLTTTESRQQPMALAVALTKGGEARGELFWDDGESLEVLERGAYTQVIFLARNNTIVNELVRVTSEGAGLQLQKVTVLGVATAPQQVLSNGVPVSNFTYSPDTKVLDICVSLLMGEQFLVSWC

SEQ ID NO: 4522 - protein, 952 aa, Homo sapiens; identical to SEQ ID NO: 4521

SEQ ID NO: 4523 - protein, 952 aa, Homo sapiens; identical to SEQ ID NO: 4521

SEQ ID NO: 4524 - protein, 105 aa, Homo sapiens
MFTCWWSYLRSTLAAVPGEASRVQQRKESKKPPAKLQPRALAGWLRPEDGGQAEGAEDELEVRFNAPFDVGIKLSGVQYQQHSQALGKFLQDILWEEAKEAPADK

SEQ ID NO: 4525 - protein, 104 aa, Homo sapiens
MFTCWWSYLRSTLAAVPGEASRVQRKESKKPPAKLQPRALAGWLRPEDGGQAEGAEDELEVRFNAPFDVGIKLSGVQYQQHSQALGKFLQDILWEEAKEAPADK

SEQ ID NO: 4526 - protein, 116 aa, Homo sapiens
MPSPGTVCSLLLLGMLWLDLAMAGSSFLSPEHQRVQRKESKKPPAKLQPRALAGWLRPEDGGQAEGAEDELEVRFNAPFDVGIKLSGVQYQQHSQALGKFLQDILWEEAKEAPADK

SEQ ID NO: 4527 - protein, 117 aa, Homo sapiens
MPSPGTVCSLLLLGMLWLDLAMAGSSFLSPEHQRVQQRKESKKPPAKLQPRALAGWLRPEDGGQAEGAEDELEVRFNAPFDVGIKLSGVQYQQHSQALGKFLQDILWEEAKEAPADK

SEQ ID NO: 4528 - protein, 66 aa, Homo sapiens
MFTCWWSYLRSTLAAVPGEASRVQFNAPFDVGIKLSGVQYQQHSQALGKFLQDILWEEAKEAPADK

SEQ ID NO: 4529 - protein, 204 aa, Homo sapiens
MAGPATQSPMKLMALQLLLWHSALWTVQEATPLGPASSLPQSFLLKCLEQVRKIQGDGAALQEKLCATYKLCHPEELVLLGHSLGIPWAPLSSCPSQALQLAGCLSQLHSGLFLYQGLLQALEGISPELGPTLDTLQLDVADFATTIWQQMEELGMAPALQPTQGAMPAFASAFQRRAGGVLVASHLQSFLEVSYRVLRHLAQP

SEQ ID NO: 4530 - protein, 171 aa, Homo sapiens
MAGPATQSPMKLMALQLLLWHSALWTVQEATPLGPASSLPQSFLLKCLEQVRKIQGDGAALQEKLVSEAGCLSQLHSGLFLYQGLLQALEGISPELGPTLDTLQLDVADFATTIWQQMEELGMAPALQPTQGAMPAFASAFQRRAGGVLVASHLQSFLEVSYRVLRHLAQP

SEQ ID NO: 4531 - protein, 207 aa, Homo sapiens
MAGPATQSPMKLMALQLLLWHSALWTVQEATPLGPASSLPQSFLLKCLEQVRKIQGDGAALQEKLVSECATYKLCHPEELVLLGHSLGIPWAPLSSCPSQALQLAGCLSQLHSGLFLYQGLLQALEGISPELGPTLDTLQLDVADFATTIWQQMEELGMAPALQPTQGAMPAFASAFQRRAGGVLVASHLQSFLEVSYRVLRHLAQP

SEQ ID NO: 4532 - protein, 875 aa, Homo sapiens
MEKLHQCYWKSGEPQSDDIEASRMKRAAAKHLIERYYHQLTEGCGNEACTNEFCASCPTFLRMDNNAAAIKALELYKINAKLCDPHPSKKGASSAYLENSKGAPNNSCSEIKMNKKGARIDFKDVTYLTEEKVYEILELCREREDYSPLIRVIGRVFSSAEALVQSFRKVKQHTKEELKSLQAKDEDKDEDEKEKAACSAAAMEEDSEASSSRIGDSSQGDNNLQKLGPDDVSVDIDAIRRVYTRLLSNEKIETAFLNALVYLSPNVECDLTYHNVYSRDPNYLNLFIIVMENRNLHSPEYLEMALPLFCKAMSKLPLAAQGKLIRLWSKYNADQIRRMMETFQQLITYKVISNEFNSRNLVNDDDAIVAASKCLKMVYYANVVGGEVDTNHNEEDDEEPIPESSELTLQELLGEERRNKKGPRVDPLETELGVKTLDCRKPLIPFEEFINEPLNEVLEMDKDYTFFKVETENKFSFMTCPFILNAVTKNLGLYYDNRIRMYSERRITVLYSLVQGQQLNPYLRLKVRRDHIIDDALVRLEMIAMENPADLKKQLYVEFEGEQGVDEGGVSKEFFQLVVEEIFNPDIGMFTYDESTKLFWFNPSSFETEGQFTLIGIVLGLAIYNNCILDVHFPMVVYRKLMGKKGTFRDLGDSHPVLYQSLKDLLEYEGNVEDDMMITFQISQTDLFGNPMMYDLKENGDKIPITNENRKEFVNLYSDYILNKSVEKQFKAFRRGFHMVTNESPLKYLFRPEEIELLICGSRNLDFQALEETTEYDGGYTRDSVLIREFWEIVHSFTDEQKRLFLQFTTGTDRAPVGGLGKLKMIIAKNGPDTERLPTSHTCFNVLLLPEYSSKEKLKERLLKAITYAKGFGML

SEQ ID NO: 4533 - protein, 872 aa, Homo sapiens
MATACKRSGEPQSDDIEASRMKRAAAKHLIERYYHQLTEGCGNEACTNEFCASCPTFLRMDNNAAAIKALELYKINAKLCDPHPSKKGASSAYLENSKGAPNNSCSEIKMNKKGARIDFKDVTYLTEEKVYEILELCREREDYSPLIRVIGRVFSSAEALVQSFRKVKQHTKEELKSLQAKDEDKDEDEKEKAACSAAAMEEDSEASSSRIGDSSQGDNNLQKLGPDDVSVDIDAIRRVYTRLLSNEKIETAFLNALVYLSPNVECDLTYHNVYSRDPNYLNLFIIVMENRNLHSPEYLEMALPLFCKAMSKLPLAAQGKLIRLWSKYNADQIRRMMETFQQLITYKVISNEFNSRNLVNDDDAIVAASKCLKMVYYANVVGGEVDTNHNEEDDEEPIPESSELTLQELLGEERRNKKGPRVDPLETELGVKTLDCRKPLIPFEEFINEPLNEVLEMDKDYTFFKVETENKFSFMTCPFILNAVTKNLGLYYDNRIRMYSERRITVLYSLVQGQQLNPYLRLKVRRDHIIDDALVRLEMIAMENPADLKKQLYVEFEGEQGVDEGGVSKEFFQLVVEEIFNPDIGMFTYDESTKLFWFNPSSFETEGQFTLIGIVLGLAIYNNCILDVHFPMVVYRKLMGKKGTFRDLGDSHPVLYQSLKDLLEYEGNVEDDMMITFQISQTDLFGNPMMYDLKENGDKIPITNENRKEFVNLYSDYILNKSVEKQFKAFRRGFHMVTNESPLKYLFRPEEIELLICGSRNLDFQALEETTEYDGGYTRDSVLIREFWEIVHSFTDEQKRLFLQFTTGTDRAPVGGLGKLKMIIAKNGPDTERLPTSHTCFNVLLLPEYSSKEKLKERLLKAITYAKGFGML

SEQ ID NO: 4534 - protein, 852 aa, Homo sapiens
MKRAAAKHLIERYYHQLTEGCGNEACTNEFCASCPTFLRMDNNAAAIKALELYKINAKLCDPHPSKKGASSAYLENSKGAPNNSCSEIKMNKKGARIDFKDVTYLTEEKVYEILELCREREDYSPLIRVIGRVFSSAEALVQSFRKVKQHTKEELKSLQAKDEDKDEDEKEKAACSAAAMEEDSEASSSRIGDSSQGDNNLQKLGPDDVSVDIDAIRRVYTRLLSNEKIETAFLNALVYLSPNVECDLTYHNVYSRDPNYLNLFIIVMENRNLHSPEYLEMALPLFCKAMSKLPLAAQGKLIRLWSKYNADQIRRMMETFQQLITYKVISNEFNSRNLVNDDDAIVAASKCLKMVYYANVVGGEVDTNHNEEDDEEPIPESSELTLQELLGEERRNKKGPRVDPLETELGVKTLDCRKPLIPFEEFINEPLNEVLEMDKDYTFFKVETENKFSFMTCPFILNAVTKNLGLYYDNRIRMYSERRITVLYSLVQGQQLNPYLRLKVRRDHIIDDALVRLEMIAMENPADLKKQLYVEFEGEQGVDEGGVSKEFFQLVVEEIFNPDIGMFTYDESTKLFWFNPSSFETEGQFTLIGIVLGLAIYNNCILDVHFPMVVYRKLMGKKGTFRDLGDSHPVLYQSLKDLLEYEGNVEDDMMITFQISQTDLFGNPMMYDLKENGDKIPITNENRKEFVNLYSDYILNKSVEKQFKAFRRGFHMVTNESPLKYLFRPEEIELLICGSRNLDFQALEETTEYDGGYTRDSVLIREFWEIVHSFTDEQKRLFLQFTTGTDRAPVGGLGKLKMIIAKNGPDTERLPTSHTCFNVLLLPEYSSKEKLKERLLKAITYAKGFGML

SEQ ID NO: 4535 - protein, 745 aa, Homo sapiens [sequence omitted]

SEQ ID NO: 4536 - protein, 133 aa, Homo sapiens
MRKHVLAASFSMLSLLVIMGDTDSKTDSSFIMDSDPRRCMRHHYVDSISHPLYKCSSKMVLLARCEGHCSQASRSEPLVSFSTVLKQPFRSSCHCCRPQTSKLKALRLRCSGGMRLTATYRYILSCHCEECNS

SEQ ID NO: 4537 - protein, 528 aa, Homo sapiens
MPTPDATTPQAKGFRRAVSELDAKQAEAIMVRGQGAPGPSLTGSPWPGTAAPAASYTPTPRSPRFIGRRQSLIEDARKEREAAVAAAAAAVPSEPGDPLEAVAFEEKEGKAVLNLLFSPRATKPSALSRAVKVFETFEAKIHHLETRPAQRPRAGGPHLEYFVRLEVRRGDLAALLSGVRQVSEDVRSPAGPKVPWFPRKVSELDKCHHLVTKFDPDLDLDHPGFSDQVYRQRRKLIAEIAFQYRHGDPIPRVEYTAEEIATWKEVYTTLKGLYATHACGEHLEAFALLERFSGYREDNIPQLEDVSRFLKERTGFQLRPVAGLLSARDFLASLAFRVFQCTQYIRHASSPMHSPEPDCCHELLGHVPMLADRTFAQFSQDIGLASLGASDEEIEKLSTLYWFTVEFGLCKQNGEVKAYGAGLLSSYGELLHCLSEEPEIRAFDPEAAAVQPYQDQTYQSVYFVSESFSDAKDKLRSYASRIQRPFSVKFDPYTLAIDVLDSPQAVRRSLEGVQDELDTLAHALSAIG

SEQ ID NO: 4538 - protein, 524 aa, Homo sapiens
MPTPDATTPQAKGFRRAVSELDAKQAEAIMGAPGPSLTGSPWPGTAAPAASYTPTPRSPRFIGRRQSLIEDARKEREAAVAAAAAAVPSEPGDPLEAVAFEEKEGKAVLNLLFSPRATKPSALSRAVKVFETFEAKIHHLETRPAQRPRAGGPHLEYFVRLEVRRGDLAALLSGVRQVSEDVRSPAGPKVPWFPRKVSELDKCHHLVTKFDPDLDLDHPGFSDQVYRQRRKLIAEIAFQYRHGDPIPRVEYTAEEIATWKEVYTTLKGLYATHACGEHLEAFALLERFSGYREDNIPQLEDVSRFLKERTGFQLRPVAGLLSARDFLASLAFRVFQCTQYIRHASSPMHSPEPDCCHELLGHVPMLADRTFAQFSQDIGLASLGASDEEIEKLSTLYWFTVEFGLCKQNGEVKAYGAGLLSSYGELLHCLSEEPEIRAFDPEAAAVQPYQDQTYQSVYFVSESFSDAKDKLRSYASRIQRPFSVKFDPYTLAIDVLDSPQAVRRSLEGVQDELDTLAHALSAIG

SEQ ID NO: 4539 - protein, 497 aa, Homo sapiens
MPTPDATTPQAKGFRRAVSELDAKQAEAIMSPRFIGRRQSLIEDARKEREAAVAAAAAAVPSEPGDPLEAVAFEEKEGKAVLNLLFSPRATKPSALSRAVKVFETFEAKIHHLETRPAQRPRAGGPHLEYFVRLEVRRGDLAALLSGVRQVSEDVRSPAGPKVPWFPRKVSELDKCHHLVTKFDPDLDLDHPGFSDQVYRQRRKLIAEIAFQYRHGDPIPRVEYTAEEIATWKEVYTTLKGLYATHACGEHLEAFALLERFSGYREDNIPQLEDVSRFLKERTGFQLRPVAGLLSARDFLASLAFRVFQCTQYIRHASSPMHSPEPDCCHELLGHVPMLADRTFAQFSQDIGLASLGASDEEIEKLSTLYWFTVEFGLCKQNGEVKAYGAGLLSSYGELLHCLSEEPEIRAFDPEAAAVQPYQDQTYQSVYFVSESFSDAKDKLRSYASRIQRPFSVKFDPYTLAIDVLDSPQAVRRSLEGVQDELDTLAHALSAIG

SEQ ID NO: 4540 - protein, 250 aa, Homo sapiens
MEKGPVRAPAEKPRGARCSNGFPERDPPRPGPSRPAEKPPRPEAKSAQPADGWKGERPRSEEDNELNLPNLAAAYSSILSSLGENPQRQGLLKTPWRAASAMQFFTKGYQETISDVLNDAIFDEDHDEMVIVKDIDMFSMCEHHLVPFVGKVHIGYLPNKQVLGLSKLARIVEIYSRRLQVQERLTKQIAVAITEALRPAGVGVVVEATHMCMVMRGVQKMNSKTVTSTMLGVFREDPKTREEFLTLIRS

SEQ ID NO: 4541 - protein, 233 aa, Homo sapiens
MEKGPVRAPAEKPRGARCSNGFPERDPPRPGPSRPAEKPPRPEAKSAQPADGWKGERPRSEEDNELNLPNLAAAYSSILSSLGENPQRQGLLKTPWRAASAMQFFTKGYQETISDVLNDAIFDEDHDEMVIVKDIDMFSMCEHHLVPFVGKVHIGYLPNKQVLGLSKLARIVEIYSRRLQVQERLTKQIAVAITEALRPAGVGVVVEATKSNKYNKGLSPLLSSCHLFVAILK

SEQ ID NO: 4542 - protein, 213 aa, Homo sapiens
MEKGPVRAPAEKPRGARCSNGFPERDPPRPGPSRPAEKPPRPEAKSAQPADGWKGERPRSEEDNELNLPNLAAAYSSILSSLGENPQRQGLLKTPWRAASAMQFFTKGYQETISDVLNDAIFDEDHDEMVIVKDIDMFSMCEHHLVPFVGKVHIGYLPNKQVLGLSKLARIVEIYSRRLQVQERLTKQIAVAITEALRPAGVGVVVEATSAEP

SEQ ID NO: 4543 - protein, 250 aa, Homo sapiens; identical to SEQ ID NO: 4540

SEQ ID NO: 4544 - protein, 205 aa, Homo sapiens
MAHAGRTGYDNREIVMKYIHYKLSQRGYEWDAGDVGAAPPGAAPAPGIFSSQPGHTPHPAASRDPVARTSPLQTPAAPGAAAGPALSPVPPVVHLTLRQAGDDFSRRYRRDFAEMSSQLHLTPFTARGRFATVVEELFRDGVNWGRIVAFFEFGGVMCVESVNREMSPLVDNIALWMTEYLNRHLHTWIQDNGGWVGALGDVSLG

SEQ ID NO: 4545 - protein, 239 aa, Homo sapiens
MAHAGRTGYDNREIVMKYIHYKLSQRGYEWDAGDVGAAPPGAAPAPGIFSSQPGHTPHPAASRDPVARTSPLQTPAAPGAAAGPALSPVPPVVHLTLRQAGDDFSRRYRRDFAEMSSQLHLTPFTARGRFATVVEELFRDGVNWGRIVAFFEFGGVMCVESVNREMSPLVDNIALWMTEYLNRHLHTWIQDNGGWDAFVELYGPSMRPLFDFSWLSLKTLLSLALVGACITLGAYLGHK

SEQ ID NO: 4546 - protein, 434 aa, Homo sapiens
MSIEKIWAREILDSRGNPTVEVDLYTAKGLFRAAVPSGASTGIYEALELRDGDKQRYLGKGVLKAVDHINSTIAPALISSGLSVVEQEKLDNLMLELDGTENKSKFGANAILGVSLAVCKAGAAERELPLYRHIAQLAGNSDLILPVPAFNVINGGSHAGNKLAMQEFMILPVGAESFRDAMRLGAEVYHTLKGVIKDKYGKDATNVGDEGGFAPNILENSEALELVKEAIDKAGYTEKIVIGMDVAASEFYRDGKYDLDFKSPTDPSRYITGDQLGALYQDFVRDYPVVSIEDPFDQDDWAAWSKFTANVGIQIVGDDLTVTNPKRIERAVEEKACNCLLLKVNQIGSVTEAIQACKLAQENGWGVMVSHRSGETEDTFIADLVVGLCTGQIKTGAPCRSERLAKYNQLMRIEEELGDEARFAGHNFRNPSVL

SEQ ID NO: 4547 - protein, 193 aa, Homo sapiens
MGVHECPAWLWLLLSLLSLPLGLPVLGAPPRLICDSRVLERYLLEAKEAENITTGCAEHCSLNENITVPDTKVNFYAWKRMEVGQQAVEVWQGLALLSEAVLRGQALLVNSSQPWEPLQLHVDKAVSGLRSLTTLLRALGAQKEAISPPDAASAAPLRTITADTFRKLFRVYSNFLRGKLKLYTGEACRTGDR

SEQ ID NO: 4548 - protein, 536 aa, Homo sapiens
MEFSSPSREECPKPLSRVSIMAGSLTGLLLLQAVSWASGARPCIPKSFGYSSVVCVCNATYCDSFDPPTFPALGTFSRYESTRSGRRMELSMGPIQANHTGTGLLLTLQPEQKFQKVKGFGGAMTDAAALNILALSPPAQNLLLKSYFSEEGIGYNIIRVPMASCDFSIRTYTYADTPDDFQLHNFSLPEEDTKLKIPLIHRALQLAQRPVSLLASPWTSPTWLKTNGAVNGKGSLKGQPGDIYHQTWARYFVKFLDAYAEHKLQFWAVTAENEPSAGLLSGYPFQCLGFTPEHQRDFIARDLGPTLANSTHHNVRLLMLDDQRLLLPHWAKVVLTDPEAAKYVHGIAVHWYLDFLAPAKATLGETHRLFPNTMLFASEACVGSKFWEQSVRLGSWDRGMQYSHSIITNLLYHVVGWTDWNLALNPEGGPNWVRNFVDSPIIVDITKDTFYKQPMFYHLGHFSKFIPEGSQRVGLVASQKNDLDAVALMHPDGSAVVVVLNRSSKDVPLTIKDPAVGFLETISPGYSIHTYLWRRQ

SEQ ID NO: 4549 - protein, 487 aa, Homo sapiens
MEFSSPSREECPKPLSRVSIMAGSLTGLLLLQAVSWASGARPCIPKSFGYSSVVCVCNATYCDSFDPPTFPALGTFSRYESTRSGRRMELSMGPIQANHTGTGIGYNIIRVPMASCDFSIRTYTYADTPDDFQLHNFSLPEEDTKLKIPLIHRALQLAQRPVSLLASPWTSPTWLKTNGAVNGKGSLKGQPGDIYHQTWARYFVKFLDAYAEHKLQFWAVTAENEPSAGLLSGYPFQCLGFTPEHQRDFIARDLGPTLANSTHHNVRLLMLDDQRLLLPHWAKVVLTDPEAAKYVHGIAVHWYLDFLAPAKATLGETHRLFPNTMLFASEACVGSKFWEQSVRLGSWDRGMQYSHSIITNLLYHVVGWTDWNLALNPEGGPNWVRNFVDSPIIVDITKDTFYKQPMFYHLGHFSKFIPEGSQRVGLVASQKNDLDAVALMHPDGSAVVVVLNRSSKDVPLTIKDPAVGFLETISPGYSIHTYLWRRQ

SEQ ID NO: 4550 - protein, 536 aa, Homo sapiens; identical to SEQ ID NO: 4548

SEQ ID NO: 4551 - protein, 449 aa, Homo sapiens
MELSMGPIQANHTGTGLLLTLQPEQKFQKVKGFGGAMTDAAALNILALSPPAQNLLLKSYFSEEGIGYNIIRVPMASCDFSIRTYTYADTPDDFQLHNFSLPEEDTKLKIPLIHRALQLAQRPVSLLASPWTSPTWLKTNGAVNGKGSLKGQPGDIYHQTWARYFVKFLDAYAEHKLQFWAVTAENEPSAGLLSGYPFQCLGFTPEHQRDFIARDLGPTLANSTHHNVRLLMLDDQRLLLPHWAKVVLTDPEAAKYVHGIAVHWYLDFLAPAKATLGETHRLFPNTMLFASEACVGSKFWEQSVRLGSWDRGMQYSHSIITNLLYHVVGWTDWNLALNPEGGPNWVRNFVDSPIIVDITKDTFYKQPMFYHLGHFSKFIPEGSQRVGLVASQKNDLDAVALMHPDGSAVVVVLNRSSKDVPLTIKDPAVGFLETISPGYSIHTYLWRRQ

SEQ ID NO: 4552 - protein, 536 aa, Homo sapiens; identical to SEQ ID NO: 4548

SEQ ID NO: 4553 - protein, 346 aa, Homo sapiens
MARKSNLPVLLVPFLLCQALVRCSSPLPLVVNTWPFKNATEAAWRALASGGSALDAVESGCAMCEREQCDGSVGFGGSPDELGETTLDAMIMDGTTMDVGAVGDLRRIKNAIGVARKVLEHTTHTLLVGESATTFAQSMGFINEDLSTTASQALHSDWLARNCQPNYWRNVIPDPSKYCGPYKPPGILKQDIPIHKETEDDRGHDTIGMVVIHKTGHIAAGTSTNGIKFKIHGRVGDSPIPGAGAYADDTAGAAAATGNGDILMRFLPSYQAVEYMRRGEDPTIACQKVISRIQKHFPEFFGAVICANVTGSYGAACNKLSTFTQFSFMVYNSEKNQPTEEKVDCI

SEQ ID NO: 4554 - protein, 336 aa, Homo sapiens
MARKSNLPVLLVPFLLCQALVRCSSPLPLVVNTWPFKNATEAAWRALASGGSALDAVESGCAMCEREQCDGSVGFGGSPDELGETTLDAMIMDGTTMDVGAVGDLRRIKNAIGVARKVLEHTTHTLLVGESATTFAQSMGFINEDLSTTASQALHSDWLARNCQPNYWRNVIPDPSKYCGPYKPPGILKQDIPIHKETEDDRGHDTIGMVVIHKTGHIAAGTSTNGDSPIPGAGAYADDTAGAAAATGNGDILMRFLPSYQAVEYMRRGEDPTIACQKVISRIQKHFPEFFGAVICANVTGSYGAACNKLSTFTQFSFMVYNSEKNQPTEEKVDCI

SEQ ID NO: 4555 - protein, 1118 aa, Homo sapiens
MSVEAYGPSSQTLTFLDTEEAELLGADTQGSEFEFTDFTLPSQTQTPPGGPGGPGGGGAGGPGGAGAGAAAGQLDAQVGPEGILQNGAVDDSVAKTSQLLAELNFEEDEEDTYYTKDLPIHACSYCGIHDPACVVYCNTSKKWFCNGRGNTSGSHIVNHLVRAKCKEVTLHKDGPLGETVLECYNCGCRNVFLLGFIPAKADSVVVLLCRQPCASQSSLKDINWDSSQWQPLIQDRCFLSWLVKIPSEQEQLRARQITAQQINKLEELWKENPSATLEDLEKPGVDEEPQHVLLRYEDAYQYQNIFGPLVKLEADYDKKLKESQTQDNITVRWDLGLNKKRIAYFTLPKTDSDMRLMQGDEICLRYKGDLAPLWKGIGHVIKVPDNYGDEIAIELRSSVGAPVEVTHNFQVDFVWKSTSFDRMQSALKTFAVDETSVSGYIYHKLLGHEVEDVIIKCQLPKRFTAQGLPDLNHSQVYAVKTVLQRPLSLIQGPPGTGKTVTSATIVYHLARQGNGPVLVCAPSNIAVDQLTEKIHQTGLKVVRLCAKSREAIDSPVSFLALHNQIRNMDSMPELQKLQQLKDETGELSSADEKRYRALKRTAERELLMNADVICCTCVGAGDPRLAKMQFRSILIDESTQATEPECMVPVVLGAKQLILVGDHCQLGPVVMCKKAAKAGLSQSLFERLVVLGIRPIRLQVQYRMHPALSAFPSNIFYEGSLQNGVTAADRVKKGFDFQWPQPDKPMFFYVTQGQEEIASSGTSYLNRTEAANVEKITTKLLKAGAKPDQIGIITPYEGQRSYLVQYMQFSGSLHTKLYQEVEIASVDAFQGREKDFIILSCVRANEHQGIGFLNDPRRLNVALTRARYGVIIVGNPKALSKQPLWNHLLNYYKEQKVLVEGPLNNLRESLMQFSKPRKLVNTINPGARFMTTAMYDAREAIIPGSVYDRSSQGRPSSMYFQTHDQIGMISAGPSHVAAMNIPIPFNLVMPPMPPPGYFGQANGPAAGRGTPKGKTGRGGRQKNRFGLPGPSQTNLPNSQASQDVASQPFSQGALTQGYISMSQPSQMSQPGLSQPELSQDSYLGDEFKSQIDVALSQDSTYQGERAYQHGGVTGLSQY

SEQ ID NO: 4556 - protein, 526 aa, Homo sapiens
MYALFLLASLLGAALAGPVLGLKECTRGSAVWCQNVKTASDCGAVKHCLQTVWNKPTVKSLPCDICKDVVTAAGDMLKDNATEEEILVYLEKTCDWLPKPNMSASCKEIVDSYLPVILDIIKGEMSRPGEVCSALNLCESLQKHLAELNHQKQLESNKIPELDMTEVVAPFMANIPLLLYPQDGPRSKPQPKDNGDVCQDCIQMVTDIQTAVRTNSTFVQALVEHVKEECDRLGPGMADICKNYISQYSEIAIQMMMHMDQQPKEICALVGFCDEVKEMPMQTLVPAKVASKNVIPALELVEPIKKHEVPAKSDVYCEVCEFLVKEVTKLIDNNKTEKEILDAFDKMCSKLPKSLSEECQEVVDTYGSSILSILLEEVSPELVCSMLHLCSGTRLPALTVHVTQPKDGGFCEVCKKLVGYLDRNLEKNSTKQEILAALEKGCSFLPDPYQKQCDQFVAEYEPVLIEILVEVMDPSFVCLKIGACPSAHKPLLGTEKCIWGPSYWCQNTETAAQCNAVEHCKRHVWN

SEQ ID NO: 4557 - protein, 524 aa, Homo sapiens
MYALFLLASLLGAALAGPVLGLKECTRGSAVWCQNVKTASDCGAVKHCLQTVWNKPTVKSLPCDICKDVVTAAGDMLKDNATEEEILVYLEKTCDWLPKPNMSASCKEIVDSYLPVILDIIKGEMSRPGEVCSALNLCESLQKHLAELNHQKQLESNKIPELDMTEVVAPFMANIPLLLYPQDGPRSKPQPKDNGDVCQDCIQMVTDIQTAVRTNSTFVQALVEHVKEECDRLGPGMADICKNYISQYSEIAIQMMMHMQPKEICALVGFCDEVKEMPMQTLVPAKVASKNVIPALELVEPIKKHEVPAKSDVYCEVCEFLVKEVTKLIDNNKTEKEILDAFDKMCSKLPKSLSEECQEVVDTYGSSILSILLEEVSPELVCSMLHLCSGTRLPALTVHVTQPKDGGFCEVCKKLVGYLDRNLEKNSTKQEILAALEKGCSFLPDPYQKQCDQFVAEYEPVLIEILVEVMDPSFVCLKIGACPSAHKPLLGTEKCIWGPSYWCQNTETAAQCNAVEHCKRHVWN

SEQ ID NO: 4558 - protein, 527 aa, Homo sapiens
MYALFLLASLLGAALAGPVLGLKECTRGSAVWCQNVKTASDCGAVKHCLQTVWNKPTVKSLPCDICKDVVTAAGDMLKDNATEEEILVYLEKTCDWLPKPNMSASCKEIVDSYLPVILDIIKGEMSRPGEVCSALNLCESLQKHLAELNHQKQLESNKIPELDMTEVVAPFMANIPLLLYPQDGPRSKPQPKDNGDVCQDCIQMVTDIQTAVRTNSTFVQALVEHVKEECDRLGPGMADICKNYISQYSEIAIQMMMHMQDQQPKEICALVGFCDEVKEMPMQTLVPAKVASKNVIPALELVEPIKKHEVPAKSDVYCEVCEFLVKEVTKLIDNNKTEKEILDAFDKMCSKLPKSLSEECQEVVDTYGSSILSILLEEVSPELVCSMLHLCSGTRLPALTVHVTQPKDGGFCEVCKKLVGYLDRNLEKNSTKQEILAALEKGCSFLPDPYQKQCDQFVAEYEPVLIEILVEVMDPSFVCLKIGACPSAHKPLLGTEKCIWGPSYWCQNTETAAQCNAVEHCKRHVWN

SEQ ID NO: 4559 - protein, 346 aa, Homo sapiens
MAMVSEFLKQAWFIENEEQEYVQTVKSSKGGPGSAVSPYPTFNPSSDVAALHKAIMVKGVDEATIIDILTKRNNAQRQQIKAAYLQETGKPLDETLKKALTGHLEEVVLALLKTPAQFDADELRAAMKGLGTDEDTLIEILASRTNKEIRDINRVYREELKRDLAKDITSDTSGDFRNALLSLAKGDRSEDFGVNEDLADSDARALYEAGERRKGTDVNVFNTILTTRSYPQLRRVFQKYTKYSKHDMNKVLDLELKGDIEKCLTAIVKCATSKPAFFAEKLHQAMKGVGTRHKALIRIMVSRSEIDMNDIKAFYQKMYGISLCQAILDETKGDYEKILVALCGGN

SEQ ID NO: 4560 - protein, 158 aa, Homo sapiens
MGKISSLPTQLFKCCFCDFLKVKMHTMSSSHLFYLALCLLTFTSSATAGPETLCGAELVDALQFVCGDRGFYFNKPTGYGSSSRRAPQTGIVDECCFRSCDLRRLEMYCAPLKPAKSARSVRAQRHTDMPKTQKYQPPSTNKNTKSQRRKGSTFEERK

SEQ ID NO: 4561 - protein, 137 aa, Homo sapiens
MITPTVKMHTMSSSHLFYLALCLLTFTSSATAGPETLCGAELVDALQFVCGDRGFYFNKPTGYGSSSRRAPQTGIVDECCFRSCDLRRLEMYCAPLKPAKSARSVRAQRHTDMPKTQKEVHLKNASRGSAGNKNYRM

SEQ ID NO: 4562 - protein, 153 aa, Homo sapiens
MGKISSLPTQLFKCCFCDFLKVKMHTMSSSHLFYLALCLLTFTSSATAGPETLCGAELVDALQFVCGDRGFYFNKPTGYGSSSRRAPQTGIVDECCFRSCDLRRLEMYCAPLKPAKSARSVRAQRHTDMPKTQKEVHLKNASRGSAGNKNYRM

SEQ ID NO: 4563 - protein, 200 aa, Homo sapiens
MALWMRLLPLLALLALWGPDPAAAFVNQHLCGSHLVEALYLVCGERGFFYTPKTRREAEDLQASALSLSSSTSTWPEGLDATARAPPALVVTANIGQAGGSSSRQFRQRALGTSDSPVLFIHCPGAAGTAQGLEYRGRRVTTELVWEEVDSSPQPQGSESLPAQPPAQPAPQPEPQQAREPSPEVSCCGLWPRRPQRSQN

SEQ ID NO: 4564 - protein, 180 aa, Homo sapiens
MGIPMGKSMLVLLTFLAFASCCIAAYRPSETLCGGELVDTLQFVCGDRGFYFSRPASRVSRRSRGIVEECCFRSCDLALLETYCATPAKSERDVSTPPTVLPDNFPRYPVGKFFQYDTWKQSTQRLRRGLPALLRARRGHVLAKELEAFREAKRHRPLIALPTQDPAHGGAPPEMASNRK

SEQ ID NO: 4565 - protein, 180 aa, Homo sapiens; identical to SEQ ID NO: 4564

SEQ ID NO: 4566 - protein, 236 aa, Homo sapiens
MVSPDPQIIVVAPETELASMQVQRTEDGVTIIQIFWVGRKGELLRRTPVSSAMQTPMGIPMGKSMLVLLTFLAFASCCIAAYRPSETLCGGELVDTLQFVCGDRGFYFSRPASRVSRRSRGIVEECCFRSCDLALLETYCATPAKSERDVSTPPTVLPDNFPRYPVGKFFQYDTWKQSTQRLRRGLPALLRARRGHVLAKELEAFREAKRHRPLIALPTQDPAHGGAPPEMASNRK

SEQ ID NO: 4567 - protein, 110 aa, Homo sapiens
MALWMRLLPLLALLALWGPDPAAAFVNQHLCGSHLVEALYLVCGERGFFYTPKTRREAEDLQVGQVELGGGPGAGSLQPLALEGSLQKRGIVEQCCTSICSLYQLENYCN

SEQ ID NO: 4568 - protein, 437 aa, Homo sapiens
MIVFVRFNSSHGFPVEVDSDTSIFQLKEVVAKRQGVPADQLRVIFAGKELRNDWTVQNCDLDQQSIVHIVQRPWRKGQEMNATGGDDPRNAAGGCEREPQSLTRVDLSSSVLPGDSVGLAVILHTDSRKDSPPAGSPAGRSIYNSFYVYCKGPCQRVQPGKLRVQCSTCRQATLTLTQEFFFKCGAHPTSDKETSVALHLIATNSRNITCITCTDVRSPVLVFQCNSRHVICLDCFHLYCVTRLNDRQFVHDPQLGYSLPCVAGCPNSLIKELHHFRILGEEQYNRYQQYGAEECVLQMGGVLCPRPGCGAGLLPEPDQRKVTCEGGNGLGCGFAFCRECKEAYHEGECSAVFEASGTTTQAYRVDERAAEQARWEAASKETIKKTTKPCPRCHVPVEKNGGCMHMKCPQPQCRLEWCWNCGCEWNRVCMGDHWFDV

SEQ ID NO: 4569 - protein, 316 aa, Homo sapiens
MIVFVRFNSSHGFPVEVDSDTSIFQLKEVVAKRQGVPADQLRVIFAGKELRNDWTVQEFFFKCGAHPTSDKETSVALHLIATNSRNITCITCTDVRSPVLVFQCNSRHVICLDCFHLYCVTRLNDRQFVHDPQLGYSLPCVAGCPNSLIKELHHFRILGEEQYNRYQQYGAEECVLQMGGVLCPRPGCGAGLLPEPDQRKVTCEGGNGLGCGFAFCRECKEAYHEGECSAVFEASGTTTQAYRVDERAAEQARWEAASKETIKKTTKPCPRCHVPVEKNGGCMHMKCPQPQCRLEWCWNCGCEWNRVCMGDHWFDV

SEQ ID NO: 4570 - protein, 465 aa, Homo sapiens
MIVFVRFNSSHGFPVEVDSDTSIFQLKEVVAKRQGVPADQLRVIFAGKELRNDWTVQNCDLDQQSIVHIVQRPWRKGQEMNATGGDDPRNAAGGCEREPQSLTRVDLSSSVLPGDSVGLAVILHTDSRKDSPPAGSPAGRSIYNSFYVYCKGPCQRVQPGKLRVQCSTCRQATLTLTQGPSCWDDVLIPNRMSGECQSPHCPGTSAEFFFKCGAHPTSDKETSVALHLIATNSRNITCITCTDVRSPVLVFQCNSRHVICLDCFHLYCVTRLNDRQFVHDPQLGYSLPCVAGCPNSLIKELHHFRILGEEQYNRYQQYGAEECVLQMGGVLCPRPGCGAGLLPEPDQRKVTCEGGNGLGCGFAFCRECKEAYHEGECSAVFEASGTTTQAYRVDERAAEQARWEAASKETIKKTTKPCPRCHVPVEKNGGCMHMKCPQPQCRLEWCWNCGCEWNRVCMGDHWFDV

SEQ ID NO: 4571 - protein, 466 aa, Homo sapiens
MRAPGMRSRPAGPALLLLLLFLGAAESVRRAQPPRRYTPDWPSLDSRPLPAWFDEAKFGVFIHWGVFSVPAWGSEWFWWHWQGEGRPQYQRFMRDNYPPGFSYADFGPQFTARFFHPEEWADLFQAAGAKYVVLTTKHHEGFTNWPSPVSWNWNSKDVGPHRDLVGELGTALRKRNIRYGLYHSLLEWFHPLYLLDKKNGFKTQHFVSAKTMPELYDLVNSYKPDLIWSDGEWECPDTYWNSTNFLSWLYNDSPVKDEVVVNDRWGQNCSCHHGGYYNCEDKFKPQSLPDHKWEMCTSIDKFSWGYRRDMALSDVTEESEIISELVQTVSLGGNYLLNIGPTKDGLIVPIFQERLLAVGKWLSINGEAIYASKPWRVQWEKNTTSVWYTSKGSAVYAIFLHWPENGVLNLESPITTSTTKITMLGIQGDLKWSTDPDKGLFISLPQLPPSAVPAEFAWTIKLTGVK

SEQ ID NO: 4572 - protein, 452 aa, Homo sapiens
MFDIEYFRKDPRPFFKFAKEIYPGQFQPSLCHKFIALSDKEGKLLRNYTQNIDTLEQVAGIQRIIQCHGSFATASCLICKYKVDCEAVRGDIFNQVVPRCPRCPADEPLAIMKPEIVFFGENLPEQFHRAMKYDKDEVDLLIVIGSSLKVRPVALIPSSIPHEVPQILINREPLPHLHFDVELLGDCDVIINELCHRLGGEYAKLCCNPVKLSEITEKPPRTQKELAYLSELPPTPLHVSEDSSSPERTSPPDSSVIVTLLDQAAKSNDDLDVSESKGCMEEKPQEVQTSRNVESIAEQMENPDLKNVGSSTGEKNERTSVAGTVRKCWPNRVAKEQISRRLDGNQYLFLPPNRYIFHGAEVYSDSEDDVLSSSSCGSNSDSGTCQSPSLEEPMEDESEIEEFYNGLEDEPDVPERAGGAGFGTDGDDQEAINEAISVKQEVTDMNYPSNKS

SEQ ID NO: 4573 - protein, 747 aa, Homo sapiens
MADEAALALQPGGSPSAAGADREAASSPAGEPLRKRPRRDGPGLERSPGEPGGAAPEREVPAAARGCPGAAAAALWREAEAEAAAAGGEQEAQATAAAGEGDNGPGLQGPSREPPLADNLYDEDDDDEGEEEEEAAAAAIGYRDNLLFGDEIITNGFHSCESDEEDRASHASSSDWTPRPRIGPYTFVQQHLMIGTDPRTILKDLLPETIPPPELDDMTLWQIVINILSEPPKRKKRKDINTIEDAVKLLQECKKIIVLTGAGVSVSCGIPDFRSRDGIYARLAVDFPDLPDPQAMFDIEYFRKDPRPFFKFAKEIYPGQFQPSLCHKFIALSDKEGKLLRNYTQNIDTLEQVAGIQRIIQCHGSFATASCLICKYKVDCEAVRGDIFNQVVPRCPRCPADEPLAIMKPEIVFFGENLPEQFHRAMKYDKDEVDLLIVIGSSLKVRPVALIPSSIPHEVPQILINREPLPHLHFDVELLGDCDVIINELCHRLGGEYAKLCCNPVKLSEITEKPPRTQKELAYLSELPPTPLHVSEDSSSPERTSPPDSSVIVTLLDQAAKSNDDLDVSESKGCMEEKPQEVQTSRNVESIAEQMENPDLKNVGSSTGEKNERTSVAGTVRKCWPNRVAKEQISRRLDGNQYLFLPPNRYIFHGAEVYSDSEDDVLSSSSCGSNSDSGTCQSPSLEEPMEDESEIEEFYNGLEDEPDVPERAGGAGFGTDGDDQEAINEAISVKQEVTDMNYPSNKS

SEQ ID NO: 4574 - protein, 189 aa, Homo sapiens
MASKRALVILAKGAEEMETVIPVDVMRRAGIKVTVAGLAGKDPVQCSRDVVICPDASLEDAKKEGPYDVVVLPGGNLGAQNLSESAAVKEILKEQENRKGLIAAICAGPTALLAHEIGFGSKVTTHPLAKDKMMNGGHYTYSENRVEKDGLILTSRGPGTSFEFALAIVEALNGKEVAAQVKAPLVLKD

SEQ ID NO: 4575 - protein, 189 aa, Homo sapiens; identical to SEQ ID NO: 4574

SEQ ID NO: 4576 - protein, 339 aa, Homo sapiens
MSTVHEILCKLSLEGDHSTPPSAYGSVKAYTNFDAERDALNIETAIKTKGVDEVTIVNILTNRSNAQRQDIAFAYQRRTKKELASALKSALSGHLETVILGLLKTPAQYDASELKASMKGLGTDEDSLIEIICSRTNQELQEINRVYKEMYKTDLEKDIISDTSGDFRKLMVALAKGRRAEDGSVIDYELIDQDARDLYDAGVKRKGTDVPKWISIMTERSVPHLQKVFDRYKSYSPYDMLESIRKEVKGDLENAFLNLVQCIQNKPLYFADRLYDSMKGKGTRDKVLIRIMVSRSEVDMLKIRSEFKRKYGKSLYYYIQQDTKGDYQKALLYLCGGDD

SEQ ID NO: 4577 - protein, 339 aa, Homo sapiens; identical to SEQ ID NO: 4576

SEQ ID NO: 4578 - protein, 357 aa, Homo sapiens
MGRQLAGCGDAGKKASFKMSTVHEILCKLSLEGDHSTPPSAYGSVKAYTNFDAERDALNIETAIKTKGVDEVTIVNILTNRSNAQRQDIAFAYQRRTKKELASALKSALSGHLETVILGLLKTPAQYDASELKASMKGLGTDEDSLIEIICSRTNQELQEINRVYKEMYKTDLEKDIISDTSGDFRKLMVALAKGRRAEDGSVIDYELIDQDARDLYDAGVKRKGTDVPKWISIMTERSVPHLQKVFDRYKSYSPYDMLESIRKEVKGDLENAFLNLVQCIQNKPLYFADRLYDSMKGKGTRDKVLIRIMVSRSEVDMLKIRSEFKRKYGKSLYYYIQQDTKGDYQKALLYLCGGDD

SEQ ID NO: 4579 - protein, 339 aa, Homo sapiens; identical to SEQ ID NO: 4576

SEQ ID NO: 4580 - protein, 180 aa, Homo sapiens
MKSIYFVAGLFVMLVQGSWQRSLQDTEEKSRSFSASQADPLSDPDQMNEDKRHSQGTFTSDYSKYLDSRRAQDFVQWLMNTKRNRNNIAKRHDEFERHAEGTFTSDVSSYLEGQAAKEFIAWLVKGRGRRDFPEEVAIVEELGRRHADGSFSDEMNTILDNLAARDFINWLIQTKITDRK

SEQ ID NO: 4581 - protein, 167 aa, Homo sapiens
MHWGTLCGFLWLWPYLFYVQAVPIQKVQDDTKTLIKTIVTRINDISHTQSVSSKQKVTGLDFIPGLHPILTLSKMDQTLAVYQQILTSMPSRNVIQISNDLENLRDLLHVLAFSKSCHLPWASGLETLDSLGGVLEASGYSTEVVALSRLQGSLQDMLWQLDLSPGC

SEQ ID NO: 4582 - protein, 455 aa, Homo sapiens
MDAALKRSRSEEPAEILPPARDEEEEEEEGMEQGLEEEEEVDPRIQGELEKLNQSTDDINRRETELEDARQKFRSVLVEATVKLDELVKKIGKAVEDSKPYWEARRVARQAQLEAQKATQDFQRATEVLRAAKETISLAEQRLLEDDKRQFDSAWQEMLNHATQRVMEAEQTKTRSELVHKETAARYNAAMGRMRQLEKKLKRAINKSKPYFELKAKYYVQLEQLKKTVDDLQAKLTLAKGEYKMALKNLEMISDEIHERRRSSAMGPRGCGVGAEGSSTSVEDLPGSKPEPDAISVASEAFEDDSCSNFVSEDDSETQSVSSFSSGPTSPSEMPDQFPAVVRPGSLDLPSPVSLSEFGMMFPVLGPRSECSGASSPECEVERGDRAEGAENKTSDKANNNRGLSSSSGSGGSSKSQSSTSPEGQALENRMKQLSLQCSKGRDGIIADIKMVQIG

SEQ ID NO: 4583 - protein, 298 aa, Homo sapiens
MLNHATQRVMEAEQTKTRSELVHKETAARYNAAMGRMRQLEKKLKRAINKSKPYFELKAKYYVQLEQLKKTVDDLQAKLTLAKGEYKMALKNLEMISDEIHERRRSSAMGPRGCGVGAEGSSTSVEDLPGSKPEPDAISVASEAFEDDSCSNFVSEDDSETQSVSSFSSGPTSPSEMPDQFPAVVRPGSLDLPSPVSLSEFGMMFPVLGPRSECSGASSPECEVERGDRAEGAENKTSDKANNNRGLSSSSGSGGSSKSQSSTSPEGQALENRMKQLSLQCSKGRDGIIADIKMVQIG

SEQ ID NO: 4584 - protein, 200 aa, Homo sapiens
MAFTEHSPLTPHRRDLCSRSIWLARKIRSDLTALTESYVKHQGLNKNINLDSADGMPVASTDQWSELTEAERLQENLQAYRTFHVLLARLLEDQQVHFTPTEGDFHQAIHTLLLQVAAFAYQIEELMILLEYKIPRNEADGMPINVGDGGLFEKKLWGLKVLQELSQWTVRSIHDLRFISSHQTGIPARGSHYIANNKKM

SEQ ID NO: 4585 - protein, 570 aa, Homo sapiens
MPGETEEPRPPEQQDQEGGEAAKAAPEEPQQRPPEAVAAAPAGTTSSRVLRGGRDRGRAAAAAAAAAVSRRRKAEYPRRRRSSPSARPPDVPGQQPQAAKSPSPVQGKKSPRLLCIEKVTTDKDPKEEKEEEDDSALPQEVSIAASRPSRGWRSSRTSVSRHRDTENTRSSRSKTGSLQLICKSEPNTDQLDYDVGEEHQSPGGISSEEEEEEEEEMLISEEEIPFKDDPRDETYKPHLERETPKPRRKSGKVKEEKEKKEIKVEVEVEVKEEENEIREDEEPPRKRGRRRKDDKSPRLPKRRKKPPIQYVRCEMEGCGTVLAHPRYLQHHIKYQHLLKKKYVCPHPSCGRLFRLQKQLLRHAKHHTDQRDYICEYCARAFKSSHNLAVHRMIHTGEKPLQCEICGFTCRQKASLNWHMKKHDADSFYQFSCNICGKKFEKKDSVVAHKAKSHPEVLIAEALAANAGALITSTDILGTNPESLTQPSDGQGLPLLPEPLGNSTSGECLLLEAEGMSKSYCSGTERVSLMADGKIFVGSGSSGGTEGLVMNSDILGATTEVLIEDSDSAGP

SEQ ID NO: 4586 - protein, 429 aa, Homo sapiens
MQLRNPELHLGCALALRFLALVSWDIPGARALDNGLARTPTMGWLHWERFMCNLDCQEEPDSCISEKLFMEMAELMVSEGWKDAGYEYLCIDDCWMAPQRDSEGRLQADPQRFPHGIRQLANYVHSKGLKLGIYADVGNKTCAGFPGSFGYYDIDAQTFADWGVDLLKFDGCYCDSLENLADGYKHMSLALNRTGRSIVYSCEWPLYMWPFQKPNYTEIRQYCNHWRNFADIDDSWKSIKSILDWTSFNQERIVDVAGPGGWNDPDMLVIGNFGLSWNQQVTQMALWAIMAAPLFMSNDLRHISPQAKALLQDKDVIAINQDPLGKQGYQLRQGDNFEVWERPLSGLAWAVAMINRQEIGGPRSYTIAVASLGKGVACNPACFITQLLPVKRKLGFYEWTSRLRSHINPTGTVLLQLENTMQMSLKDLL

SEQ ID NO: 4587 - protein, 426 aa, Homo sapiens
MERPIKDSMFSLALKCLISLSTIILLGLIIAYHTREVQLFVIDNGADDWRIAMTYERILYISLEMLVCAIHPIPGEYKFFWTARLAFSYTPSRAEADVDIILSIPMFLRLYLIARVMLLHSKLFTDASSRSIGALNKINFNTRFVMKTLMTICPGTVLLVFSISLWIIAAWTVRVCERYHDQQDVTSNFLGAMWLISITFLSIGYGDMVPHTYCGKGVCLLTGIMGAGCTALVVAVVARKLELTKAEKHVHNFMMDTQLTKRIKNAAANVLRETWLIYKHTKLLKKIDHAKVRKHQRKFLQAIHQLRSVKMEQRKLSDQANTLVDLSKMQNVMYDLITELNDRSEDLEKQIGSLESKLEHLTASFNSLPLLIADTLRQQQQQLLSAIIEARGVSVAVGTTHTPISDSPIGVSSTSFPTPYTSSSSC

SEQ ID NO: 4588 - protein, 731 aa, Homo sapiens
MDTSGHFHDSGVGDLDEDPKCPCPSSGDEQQQQQQQQQQQQPPPPAPPAAPQQPLGPSLQPQPPQLQQQQQQQQQQQQQQPPHPLSQLAQLQSQPVHPGLLHSSPTAFRAPPSSNSTAILHPSSRQGSQLNLNDHLLGHSPSSTATSGPGGGSRHRQASPLVHRRDSNPFTEIAMSSCKYSGGVMKPLSRLSASRRNLIEAETEGQPLQLFSPSNPPEIVISSREDNHAHQTLLHHPNATHNHQHAGTTASSTTFPKANKRKNQNIGYKLGHRRALFEKRKRLSDYALIFGMFGIVVMVIETELSWGLYSKDSMFSLALKCLISLSTIILLGLIIAYHTREVQLFVIDNGADDWRIAMTYERILYISLEMLVCAIHPIPGEYKFFWTARLAFSYTPSRAEADVDIILSIPMFLRLYLIARVMLLHSKLFTDASSRSIGALNKINFNTRFVMKTLMTICPGTVLLVFSISLWIIAAWTVRVCERYHDQQDVTSNFLGAMWLISITFLSIGYGDMVPHTYCGKGVCLLTGIMGAGCTALVVAVVARKLELTKAEKHVHNFMMDTQLTKRIKNAAANVLRETWLIYKHTKLLKKIDHAKVRKHQRKFLQAIHQLRSVKMEQRKLSDQANTLVDLSKMQNVMYDLITELNDRSEDLEKQIGSLESKLEHLTASFNSLPLLIADTLRQQQQQLLSAIIEARGVSVAVGTTHTPISDSPIGVSSTSFPTPYTSSSSC

SEQ ID NO: 4589 - protein, 509 aa, Homo sapiens
MSMGAPRSLLLALAAGLAVARPPNIVLIFADDLGYGDLGCYGHPSSTTPNLDQLAAGGLRFTDFYVPVSLCTPSRAALLTGRLPVRMGMYPGVLVPSSRGGLPLEEVTVAEVLAARGYLTGMAGKWHLGVGPEGAFLPPHQGFHRFLGIPYSHDQGPCQNLTCFPPATPCDGGCDQGLVPIPLLANLSVEAQPPWLPGLEARYMAFAHDLMADAQRQDRPFFLYYASHHTHYPQFSGQSFAERSGRGPFGDSLMELDAAVGTLMTAIGDLGLLEETLVIFTADNGPETMRMSRGGCSGLLRCGKGTTYEGGVREPALAFWPGHIAPGVTHELASSLDLLPTLAALAGAPLPNVTLDGFDLSPLLLGTGKSPRQSLFFYPSYPDEVRGVFAVRTGKYKAHFFTQGSAHSDTTADPACHASSSLTAHEPPLLYDLSKDPGENYNLLGGVAGATPEVLQALKQLQLLKAQLDAAVTFGPSQVARGEDPALQICCHPGCTPRPACCHCPDPHA

SEQ ID NO: 4590 - protein, 423 aa, Homo sapiens
MGMYPGVLVPSSRGGLPLEEVTVAEVLAARGYLTGMAGKWHLGVGPEGAFLPPHQGFHRFLGIPYSHDQGPCQNLTCFPPATPCDGGCDQGLVPIPLLANLSVEAQPPWLPGLEARYMAFAHDLMADAQRQDRPFFLYYASHHTHYPQFSGQSFAERSGRGPFGDSLMELDAAVGTLMTAIGDLGLLEETLVIFTADNGPETMRMSRGGCSGLLRCGKGTTYEGGVREPALAFWPGHIAPGVTHELASSLDLLPTLAALAGAPLPNVTLDGFDLSPLLLGTGKSPRQSLFFYPSYPDEVRGVFAVRTGKYKAHFFTQGSAHSDTTADPACHASSSLTAHEPPLLYDLSKDPGENYNLLGGVAGATPEVLQALKQLQLLKAQLDAAVTFGPSQVARGEDPALQICCHPGCTPRPACCHCPDPHA

SEQ ID NO: 4591 - protein, 509 aa, Homo sapiens; identical to SEQ ID NO: 4589

SEQ ID NO: 4592 - protein, 509 aa, Homo sapiens; identical to SEQ ID NO: 4589

SEQ ID NO: 4593 - protein, 509 aa, Homo sapiens; identical to SEQ ID NO: 4589

SEQ ID NO: 4594 - protein, 354 aa, Homo sapiens
MAAPALGLVCGRCPELGLVLLLLLLSLLCGAAGSQEAGTGAGAGSLAGSCGCGTPQRPGAHGSSAAAHRYSREANAPGPVPGERQLAHSKMVPIPAGVFTMGTDDPQIKQDGEAPARRVTIDAFYMDAYEVSNTEFEKFVNSTGYLTEAEKFGDSFVFEGMLSEQVKTNIQQAVAAAPWWLPVKGANWRHPEGPDSTILHRPDHPVLHVSWNDAVAYCTWAGKRLPTEAEWEYSCRGGLHNRLFPWGNKLQPKGQHYANIWQGEFPVTNTGEDGFQGTAPVDAFPPNGYGLYNIVGNAWEWTSDWWTVHHSVEETLNPSYCYRYRCAARSQNTPDSSASNLGFRCAADRLPTMD

SEQ ID NO: 4595 - protein, 349 aa, Homo sapiens
MAAPALGLVCGRCPELGLVLLLLLLSLLCGAAGSQEAGTGAGAGSLAGSCGCGTPQRPGAHGSSAAAHRYSREANAPGPVPGERQLAHSKMVPIPAGVFTMGTDDPQIKQDGEAPARRVTIDAFYMDAYEVSNTEFEKFVNSTGYLTEVAAAPWWLPVKGANWRHPEGPDSTILHRPDHPVLHVSWNDAVAYCTWAGKRLPTEAEWEYSCRGGLHNRLFPWGNKLQPKGQHYANIWQGEFPVTNTGEDGFQGTAPVDAFPPNGYGLYNIVGNAWEWTSDWWTVHHSVEETLNPKGPPSGKDRVKKGGSYMCHRSYCYRYRCAARSQNTPDSSASNLGFRCAADRLPTMD

SEQ ID NO: 4596 - protein, 374 aa, Homo sapiens
MAAPALGLVCGRCPELGLVLLLLLLSLLCGAAGSQEAGTGAGAGSLAGSCGCGTPQRPGAHGSSAAAHRYSREANAPGPVPGERQLAHSKMVPIPAGVFTMGTDDPQIKQDGEAPARRVTIDAFYMDAYEVSNTEFEKFVNSTGYLTEAEKFGDSFVFEGMLSEQVKTNIQQAVAAAPWWLPVKGANWRHPEGPDSTILHRPDHPVLHVSWNDAVAYCTWAGKRLPTEAEWEYSCRGGLHNRLFPWGNKLQPKGQHYANIWQGEFPVTNTGEDGFQGTAPVDAFPPNGYGLYNIVGNAWEWTSDWWTVHHSVEETLNPKGPPSGKDRVKKGGSYMCHRSYCYRYRCAARSQNTPDSSASNLGFRCAADRLPTMD

SEQ ID NO: 4597 - protein, 196 aa, Homo sapiens
MRLPLLVSAGVLLVALLPCPPCRALLSRGPVPGARQAPQHPQPLDFFQPPPQSEQPQQPQARPVLLRMGEEYFLRLGNLNKSPAAPLSPASSLLAGGSGSRPSPEQATANFFRVLLQQLLLPRRSLDSPAALAERGARNALGGHQEAPERERRSEEPPISLDLTFHLLREVLEMARAEQLAQQAHSNRKLMEIIGK

SEQ ID NO: 4598 - protein, 631 aa, Homo sapiens
MPRYGASLRQSCPRSGREQGQDGTAGAPGLLWMGLVLALALALALALALSDSRVLWAPAEAHPLSPQGHPARLHRIVPRLRDVFGWGNLTCPICKGLFTAINLGLKKEPNVARVGSVAIKLCNLLKIAPPAVCQSIVHLFEDDMVEVWRRSVLSPSEACGLLLGSTCGHWDIFSSWNISLPTVPKPPPKPPSPPAPGAPVSRILFLTDLHWDHDYLEGTDPDCADPLCCRRGSGLPPASRPGAGYWGEYSKCDLPLRTLESLLSGLGPAGPFDMVYWTGDIPAHDVWHQTRQDQLRALTTVTALVRKFLGPVPVYPAVGNHESTPVNSFPPPFIEGNHSSRWLYEAMAKAWEPWLPAEALRTLRIGGFYALSPYPGLRLISLNMNFCSRENFWLLINSTDPAGQLQWLVGELQAAEDRGDKVHIIGHIPPGHCLKSWSWNYYRIVARYENTLAAQFFGHTHVDEFEVFYDEETLSRPLAVAFLAPSATTYIGLNPGYRVYQIDGNYSGSSHVVLDHETYILNLTQANIPGAIPHWQLLYRARETYGLPNTLPTAWHNLVYRMRGDMQLFQTFWFLYHKGHPPSEPCGTPCRLATLCAQLSARADSPALCRHLMPDGSLPEAQSLWPRPLFC

SEQ ID NO: 4599 - protein, 630 aa, Homo sapiens
MPRYGASLRQSCPRSGREQGQDGTAGAPGLLWMGLVLALALALALALALSDSRVLWAPAEAHPLSPQGHPARLHRIVPRLRDVFGWGNLTCPICKGLFTAINLGLKEPNVARVGSVAIKLCNLLKIAPPAVCQSIVHLFEDDMVEVWRRSVLSPSEACGLLLGSTCGHWDIFSSWNISLPTVPKPPPKPPSPPAPGAPVSRILFLTDLHWDHDYLEGTDPDCADPLCCRRGSGLPPASRPGAGYWGEYSKCDLPLRTLESLLSGLGPAGPFDMVYWTGDIPAHDVWHQTRQDQLRALTTVTALVRKFLGPVPVYPAVGNHESTPVNSFPPPFIEGNHSSRWLYEAMAKAWEPWLPAEALRTLRIGGFYALSPYPGLRLISLNMNFCSRENFWLLINSTDPAGQLQWLVGELQAAEDRGDKVHIIGHIPPGHCLKSWSWNYYRIVARYENTLAAQFFGHTHVDEFEVFYDEETLSRPLAVAFLAPSATTYIGLNPGYRVYQIDGNYSGSSHVVLDHETYILNLTQANIPGAIPHWQLLYRARETYGLPNTLPTAWHNLVYRMRGDMQLFQTFWFLYHKGHPPSEPCGTPCRLATLCAQLSARADSPALCRHLMPDGSLPEAQSLWPRPLFC

SEQ ID NO: 4600 - DNA, 1431 bp, Homo sapiens
  source 1..1431: mol_type = genomic DNA
atggcgtcacgcatagggttgcgcatgcagctcatgcgggagcaggcgcagcaggaggagcagcgggagcgcatgcagcaacaggctgtcatgcattacatgcagcagcagcagcagcagcaacagcagcagctcggagggccgcccaccccggccatcaatacccccgtccacttccagtcgccaccacctgtgcctggggaggtgttgaaggtgcagtcctacctggagaatcccacatcctaccatctgcagcagtcgcagcatcagaaggtgcgggagtacctgtccgagacctatgggaacaagtttgctgcccacatcagcccagcccagggctctccgaaacccccaccagccgcctccccaggggtgcgagctggacacgtgctgtcctcctccgctggcaacagtgctcccaatagccccatggccatgctgcacattggctccaaccctgagagggagttggatgatgtcattgacaacattatgcgtctggacgatgtccttggctacatcaatcctgaaatgcagatgcccaacacgctacccctgtccagcagccacctgaatgtgtacagcagcgacccccaggtcacagcctccctggtgggcgtcaccagcagctcctgccctgcggacctgacccagaagcgagagctcacagatgctgagagcagggccctggccaaggagcggcagaagaaagacaatcacaacttaattgaaaggagacgaaggttcaacatcaatgaccgcatcaaggagttgggaatgctgatccccaaggccaatgacctggacgtgcgctggaacaagggcaccatcctcaaggcctctgtggattacatccggaggatgcagaaggacctgcaaaagtccagggagctggagaaccactctcgccgcctggagatgaccaacaagcagctctggctccgtatccaggagctggagatgcaggctcgagtgcacggcctccctaccacctccccgtccggcatgaacatggctgagctggcccagcaggtggtgaagcaggagctgcctagcgaagagggcccaggggaggccctgatgctgggggctgaggtccctgaccctgagccactgccagctctgcccccgcaagccccgctgcccctgcccacccagccaccatccccattccatcacctggacttcagccacagcctgagctttgggggcagggaggacgagggtcccccgggctaccccgaacccctggcgccggggcatggctccccattccccagcctgtccaagaaggatctggacctcatgctcctggacgactcactgctaccgctggcctctgatccacttctgtccaccatgtcccccgaggcctccaaggccagcagccgccggagcagcttcagcatggaggagggcgatgtgctgtga

SEQ ID NO: 4601 - DNA, 2058 bp, Homo sapiens
  source 1..2058: mol_type = genomic DNA
atggctgagtggctactctcggcttcctggcaacgccgagcgaaagctatgactgcggccgcgggttcggcgggccgcgccgcggtgcccttgctgctgtgtgcgctgctggcgcccggcggcgcgtacgtgctcgacgactccgacgggctgggccgggagttcgacggcatcggcgcggtcagcggcggcggggcaacctcccgacttctagtaaattacccagagccctatcgttctcagatattggattatctctttaagccgaattttggtgcctctttgcatattttaaaagtggaaataggtggtgatgggcagacaacagacggcactgagccctcccacatgcattatgcactagatgagaattatttccgaggatacgagtggtggttgatgaaagaagctaagaagaggaatcccaatattacactcattgggttgccatggtcattccctggatggctgggaaaaggtttcgactggccttatgtcaatcttcagctgactgcctattatgtcgtgacctggattgtgggcgccaagcgttaccatgatttggacattgattatattggaatttggaatgagaggtcatataatgccaattatattaagatattaagaaaaatgctgaattatcaaggtctccagcgagtgaaaatcatagcaagtgataatctctgggagtccatctctgcatccatgctccttgatgccgaactcttcaaggtggttgatgttataggggctcattatcctggaacccattcagcaaaagatgcaaagttgactgggaagaagctttggtcttctgaagactttagcactttaaatagtgacatgggtgcaggctgctggggtcgcattttaaatcagaattatatcaatggctatatgacttccacaatcgcatggaatttagtggctagttactatgaacagttgccttatgggagatgcgggttgatgacggcccaggagccatggagtgggcactacgtggtagaatctcctgtctgggtatcagctcataccactcagtttactcaacctggctggtattacctgaagacagttggccatttagagaaaggaggaagctacgtagctctgactgatggcttagggaacctcaccatcatcattgaaaccatgagtcataaacattctaagtgcatacggccatttcttccttatttcaatgtgtcacaacaatttgccacctttgttcttaagggatcttttagtgaaataccagagctacaggtatggtataccaaacttggaaaaacatccgaaagatttctttttaagcagctggattctctatggctccttgacagcgatggcagtttcacactgagcctgcatgaagatgagctgttcacactcaccactctcaccactggtcgcaaaggcagctacccgcttcctccaaaatcccagcccttcccaagtacctataaggatgatttcaatgttgattacccattttttagtgaagctccaaactttgctgatcaaactggtgtatttgaatattttacaaatattgaagaccctggcgagcatcacttcacgctacgccaagttctcaaccagagacccattacgtgggctgccgatgcatccaacacaatcagtattataggagactacaactggaccaatctgactataaagtgtgatgtatacatagagacccctgacacaggaggtgtgttcattgcaggaagagtaaataaaggtggtattttgattagaagtgccagaggaattttcttctggatttttgcaaatggatcttacagggttacaggtgatttagctggatggattatatatgctttaggacgtgttgaagttacagcaaaaaaatggtatacactcacgttaactattaagggtcatttcacctctggcatgctgaatgacaagtctctgtggacagacatccctgtgaattttccaaagaatggctgggctgcaattggaactcactcctttgaatttgcacagtttgacaactttcttgtggaagccacacgctaa

SEQ ID NO: 4602 - DNA, 942 bp, synthetic construct
  misc_feature 1..942: note = ASPA codon optimized
  source 1..942: mol_type = other DNA
atgacaagctgccacatcgcggaggaacacatccagaaggtcgcgatcttcggcggaacgcacggcaacgagctcacaggagtcttcctggtgaagcactggctcgagaacggagcggaaatccagcgcaccggactggaagtcaagccgttcatcactaaccctcgcgcggtgaagaagtgcacgcgctacatcgactgcgacctcaaccgcatcttcgacctcgagaacctgggcaagaagatgtctgaagacctgccttacgaagtgcgccgcgcgcaggagatcaaccacctcttcggaccgaaggactctgaagactcgtacgacatcatcttcgacctgcacaacacgacatcgaacatgggctgcacactcatcctggaagacagccgcaacaacttcctcatccagatgttccactacatcaagacatctctcgcgcccctgccttgctacgtctacctgatcgagcacccgagcctcaagtacgcgaccactcgctctatcgcgaagtaccctgtcggcatcgaagtgggacctcagcctcagggagtgctgagagcggacatcctcgaccagatgcgcaagatgatcaagcacgcgctggacttcatccaccacttcaacgagggaaaggagttcccgccgtgcgcgatcgaggtctacaagatcatcgaaaaggtggactaccctcgcgacgagaacggcgaaatcgcggcgatcatccaccccaacctgcaggaccaggactggaagcctctccaccctggcgaccccatgttcctcaccctggacggaaagactatccccctgggcggagactgcactgtctacccggtcttcgtgaacgaggcggcgtactacgagaagaaggaagcgttcgcgaagacgacaaagctcacgctgaacgcgaagtcgatccgctgctgcctccactga

SEQ ID NO: 4603 - DNA, 420 bp, synthetic construct
  misc_feature 1..420: note = human GALC isoform 1 codon optimized
  source 1..420: mol_type = other DNA
atggcggagtggctcctgagcgcgtcttggcagcgcagagccaaggccatgacagcggcggcaggatctgccggaagagccgcggtccccctcctgctctgcgcgctgctcgcgccgggcggagcgtacgtgctcgacgactctgacggactgggaagagagttcgacggaattggcgcggtgtctggcggcggcgcgacatcgcgcctgctcgtgaactaccccgaaccgtaccgctcgcagatcctggactacctcttcaagcctaacttcggagcgagcctgcacatcctcaaggtcgagatcggaggcgacggacagacgacagacggcactgagcccagccacatgcactacgcgctcgacgaaaactacttccgcggctacgagtggtggctgatgaaggaagcgaagaagcgc

SEQ ID NO: 4604 - DNA, 1431 bp, synthetic construct
  misc_feature 1..1431: note = human TFEB (Transcription factor EB) isoform 1 codon optimized
  source 1..1431: mol_type = other DNA
atggcgtctcgcatcggcctccgcatgcagctgatgagagagcaggcccagcaggaagagcagcgcgaacgcatgcagcagcaggcggtcatgcactacatgcaacaacagcaacaacagcagcagcagcagctcggcggaccgcctacccctgcgatcaacactcccgtgcacttccagtctcccccgcctgtgcctggagaggtcctcaaggtgcagtcgtacctggaaaaccctacgtcgtaccacctccagcagagccagcaccagaaggtgcgcgagtacctgtcggaaacatacggcaacaagttcgccgcccacatctctcctgcccagggatctcctaagcccccgcctgccgccagccctggagtgagagccggacacgtgctctcttctagcgcgggcaactctgcgcctaactcgcccatggcgatgctccacatcggatcgaaccctgagcgcgaactggacgacgtcatcgacaacatcatgcgcctcgacgacgtgctgggctacatcaaccccgagatgcagatgccgaacaccctccctctgtcttcgagccacctcaacgtctactcgtctgaccctcaggtgacagccagcctggtcggagtgactagctcttcttgccctgccgacctcacacagaagagagagctgacagacgcggaatctcgcgcgctcgcgaaggaacgccagaagaaggacaaccacaacctgatcgagcgccgccgcagattcaacatcaacgaccgcatcaaggaactcggcatgctgatcccgaaggcgaacgacctcgacgtccgctggaacaagggaaccatcctgaaggcgtctgtggactacatccgcagaatgcagaaggacctccagaagagccgcgagctggaaaaccactctcgccgcctcgagatgactaacaagcagctctggctgcgcatccaggagctggaaatgcaggccagagtgcacggcctgcctacaacatctccttctggaatgaacatggcggagctcgcgcagcaggtcgtgaagcaggaactgccgtctgaggaaggcccgggagaagccctcatgctgggagcggaggtgcctgacccggaacctctgcctgccctcccgccgcaggccccgctccctctgcccacgcagcctccctctcctttccaccacctcgacttcagccactctctgtcgttcggcggacgcgaggacgaaggcccgcctggatacccggaacctctcgcgccgggacacggatcgcccttccctagcctgtctaagaaggacctcgacctgatgctcctggacgactcgctgctcccgctggcctctgaccctctcctgtctacaatgtctcctgaagcctctaaggccagctctcgccgctctagcttcagcatggaggaaggcgacgtcctgtga

SEQ ID NO: 4605 - protein, 610 aa, synthetic construct
  REGION 1..610: note = DHFR (version 2) amino acid sequence
MQKPVCLVVAMTPKRGIGINNGLPWPHLTTDFKHFSRVTKTTPEEASRLNGWLPRKFAKTGDSGLPSPSVGKRFNAVVMGRKTWESMPRKFRPLVDRLNIVVSSSLKEEDIAAEKPQAEGQQRVRVCASLPAALSLLEEEYKDSVDQIFVVGGAGLYEAALSLGVASHLYITRVAREFPCDVFFPAFPGDDILSNKSTAAQAAAPAESVFVPFCPELGREKDNEATYRPIFISKTFSDNGVPYDFVVLEKRRKTDDAATAEPSNAMSSLTSTRETTPVHGLQAPSSAAAIAPVLAWMDEEDRKKREQKELIRAVPHVHFRGHEEFQYLDLIADIINNGRTMDDRTGVGVISKFGCTMRYSLDQAFPLLTTKRVFWKGVLEELLWFIRGDTNANHLSEKGVKIWDKNVTREFLDSRNLPHREVGDIGPGYGFQWRHFGAAYKDMHTDYTGQGVDQLKNVIQMLRTNPTDRRMLMTAWNPAALDEMALPPCHLLCQFYVNDQKELSCIMYQRSCDVGLGVPFNIASYSLLTLMVAHVCNLKPKEFIHFMGNTHVYTNHVEALKEQLRREPRPFPIVNILNKERIKEIDDFTAEDFEVVGYVPHGRIQMEMAV

SEQ ID NO: 4606 - DNA, 1833 bp, synthetic construct
  misc_feature 1..1833: note = DHFR (version 2) nucleic acid sequence
  source 1..1833: mol_type = other DNA
atgcagaaaccggtgtgtctggtcgtcgcgatgacccccaagaggggcatcggcatcaacaacggcctcccgtggccccacttgaccacagatttcaaacacttttctcgtgtgacaaaaacgacgcccgaagaagccagtcgcctgaacgggtggcttcccaggaaatttgcaaagacgggcgactctggacttccctctccatcagtcggcaagagattcaacgccgttgtcatgggacggaaaacctgggaaagcatgcctcgaaagtttagacccctcgtggacagattgaacatcgtcgtttcctcttccctcaaagaagaagacattgcggcggagaagcctcaagctgaaggccagcagcgcgtccgagtctgtgcttcactcccagcagctctcagccttctggaggaagagtacaaggattctgtcgaccagatttttgtcgtgggaggagcgggactgtacgaggcagcgctgtctctgggcgttgcctctcacctgtacatcacgcgtgtagcccgcgagtttccgtgcgacgttttcttccctgcgttccccggagatgacattctttcaaacaaatcaactgctgcgcaggctgcagctcctgccgagtctgtgttcgttcccttttgtccggagctcggaagagagaaggacaatgaagcgacgtatcgacccatcttcatttccaagaccttctcagacaacggggtaccctacgactttgtggttctcgagaagagaaggaagactgacgacgcagccactgcggaaccgagcaacgcaatgagctccttgacatccacgagggagacaactcccgtgcacgggttgcaggctccttcttcggccgcagccattgccccggtgttggcgtggatggacgaagaagaccggaaaaaacgcgagcaaaaggaactgattcgggccgttccgcatgttcactttagaggccatgaagaattccagtaccttgatctcattgccgacattattaacaatggaaggacaatggatgaccgaacgggcgttggtgtcatctccaaattcggctgcactatgcgctactcgctggatcaggcctttccacttctcaccacaaagcgtgtgttctggaaaggggtcctcgaagagttgctgtggttcattcgcggcgacacgaacgcaaaccatctttctgagaagggcgtgaagatttgggacaagaatgtgacacgcgagttcctcgattcgcgcaatctcccccaccgagaggtcggagacatcggcccaggctacggcttccagtggagacacttcggcgcggcatacaaagacatgcacacagactacacagggcagggcgtcgaccagctgaagaatgtgatccagatgctgagaacgaatccaacagatcgtcgcatgctcatgactgcctggaatcctgcagcgctggacgaaatggcgctgccgccttgtcacttgttgtgccagttctacgtgaacgaccagaaggagctgtcgtgcatcatgtatcagcggtcgtgcgatgtcggcctcggcgtccccttcaacatcgcttcctattcgcttttgacgctcatggttgcacacgtctgcaacctaaaacctaaggagttcattcacttcatggggaacacgcatgtctacacgaaccatgtcgaggctttaaaagagcagctgcggagagaaccgagaccgttccccattgtgaacatcctcaacaaggaacgcatcaaggaaatcgacgatttcaccgccgaggattttgaggtcgtgggctacgtcccgcacggacgaatccagatggagatggctgtctag

SEQ ID NO: 4607 - protein, 236 aa, synthetic construct
  REGION 1..236: note = mCherry mammalian codon optimized
MVSKGEEDNMAIIKEFMRFKVHMEGSVNGHEFEIEGEGEGRPYEGTQTAKLKVTKGGPLPFAWDILSPQFMYGSKAYVKHPADIPDYLKLSFPEGFKWERVMNFEDGGVVTVTQDSSLQDGEFIYKVKLRGTNFPSDGPVMQKKTMGWEASSERMYPEDGALKGEIKQRLKLKDGGHYDAEVKTTYKAKKPVQLPGAYNVNIKLDITSHNEDYTIVEQYERAEGRHSTGGMDELYK

SEQ ID NO: 4608 - DNA, 711 bp, synthetic construct
  misc_feature 1..711: note = mCherry mammalian codon optimized
  source 1..711: mol_type = other DNA
atggtgagcaagggcgaggaggataacatggccatcatcaaggagttcatgcgcttcaaggtgcacatggagggctccgtgaacggccacgagttcgagatcgagggcgagggcgagggccgcccctacgagggcacccagaccgccaagctgaaggtgaccaagggtggccccctgcccttcgcctgggacatcctgtcccctcagttcatgtacggctccaaggcctacgtgaagcaccccgccgacatccccgactacttgaagctgtccttccccgagggcttcaagtgggagcgcgtgatgaacttcgaggacggcggcgtggtgaccgtgacccaggactcctccctgcaggacggcgagttcatctacaaggtgaagctgcgcggcaccaacttcccctccgacggccccgtaatgcagaagaagaccatgggctgggaggcctcctccgagcggatgtaccccgaggacggcgccctgaagggcgagatcaagcagaggctgaagctgaaggacggcggccactacgacgctgaggtcaagaccacctacaaggccaagaagcccgtgcagctgcccggcgcctacaacgtcaacatcaagttggacatcacctcccacaacgaggactacaccatcgtggaacagtacgaacgcgccgagggccgccactccaccggcggcatggacgagctgtacaagtaa

SEQ ID NO: 4609 - DNA, 786 bp, synthetic construct
  misc_feature 1..786: note = 3' UTR DHFR (version 2) nucleic acid sequence
  source 1..786: mol_type = other DNA
aaggcgcgcccagcccacagaagctgcccgtctctcgttttcctctcttttcggagggatcagggagagtgcctcgggtcggagagagctgacgagggggtgccagagacccctgtgtcctttatcgaagaaaagggatgactcttcatgtggcatttcacacagtctcacctcgccttgttttctttttgtcaatcagaacgaaagcgagttgcgggtgacgcagatgtgcgtgtatccactcggaatgcgttatcgttctgtatgccgctagagtgctggactgttgctgtctgcccacgacagcagacaactttccttctatgcacttgcaggatggtgcagcgcaaacgacggagagaaaggagcaccctctcagtttccctacgatgtgctgtcagtttcgactcttcaccgcgaacgattggcgatacgtctctgttgacttgttaggctccgaccacgaagctcccttaactagataagccgcgacacctaagtgtacaccatttgcagatcgataatctgcgaccgctgaatccgtccagatcagtaaaaccgcaccacctaagtgtaaaccttgtttaggtcgataaaatgctaccaacccccacccacaatcgagccttgagcgtttctgcgcacgcgttggcctacgtgacttgctgatgcctgcctctggccattcatgccagtcagtgcgcataaaaatgtggacacagtcggttgacaagtgttctggcaggctacagtgacaccgcggtggagggggatccactagttcta

SEQ ID NO: 4610 - protein, 476 aa, Homo sapiens
MASRIGLRMQLMREQAQQEEQRERMQQQAVMHYMQQQQQQQQQQLGGPPTPAINTPVHFQSPPPVPGEVLKVQSYLENPTSYHLQQSQHQKVREYLSETYGNKFAAHISPAQGSPKPPPAASPGVRAGHVLSSSAGNSAPNSPMAMLHIGSNPERELDDVIDNIMRLDDVLGYINPEMQMPNTLPLSSSHLNVYSSDPQVTASLVGVTSSSCPADLTQKRELTDAESRALAKERQKKDNHNLIERRRRFNINDRIKELGMLIPKANDLDVRWNKGTILKASVDYIRRMQKDLQKSRELENHSRRLEMTNKQLWLRIQELEMQARVHGLPTTSPSGMNMAELAQQVVKQELPSEEGPGEALMLGAEVPDPEPLPALPPQAPLPLPTQPPSPFHHLDFSHSLSFGGREDEGPPGYPEPLAPGHGSPFPSLSKKDLDLMLLDDSLLPLASDPLLSTMSPEASKASSRRSSFSMEEGDVL

SEQ ID NO: 4611 - protein, 685 aa, Homo sapiens; identical to SEQ ID NO: 4399

SEQ ID NO: 4612 - protein, 1699 aa, Toxoplasma gondii
MGVHHALDDAGEMPHSGGRRAVAPIYPLDLAGRLRPAMLVLADGTEFLGYSFGYPGSVGGEVVFNTGMVGYPESLTDPSYEGQILVLTYPLIGNYGVPSSEKDEHGLPKYFEGDRIYVRALVVADYDNAAVTAHFRAENSLSAWMNTHKVPAIAGVDTRALTKHLREVGCMLGKIVVLSEEEERRSGLSLSALAALPSATAAEQRGENDATVTPDKAEARLRVERRQAALTMWEEAIRNKAKNLPWEDPNKDNLVALVSRKEVRVYKSTVVDPNLRDVLILCVDCGMKYNIYRQLLHSKFEHCNIILKVVPWDFDFGNDEFDGLFISNGPGDPERCEKTVANIRRVMERKIPIFGICLGNQLLALAAGARTYKMKYGNRGMNQPVIDLRTSRCYITPQNHGFAVDESTLPRDFLPLFVNANDRSNEGIIHRTLPFFSAQFHPEASGGPTDTFYLFGDFIASIMKAQTLKQVHTTPFSFPQKFQKVLLLGSGGLSIGQAGEFDYSGSQAIKALKEQNIFVVVVNPNIATVQTSQHMADRVYFLPVTDEFVTKVIEKEMPDGILCTFGGQTALNCAVKLHEQGVLAKFGCKILGSPIEAIIATEDRKVFAAKLEEIGEKVAESAAATNTEEAVQAAKAIGYPVLIRAAFALGGLGSGFAEDEETVRRICKEAFSHSSQVFVDKSLKGWKEVEYEVVRDCKNNCITVCNMENLDPLGIHTGDSIVVAPSQTLSNEDYYRLRDTALKVIRHFGIVGECNIQYALDPNSEKYYIVEVNARLSRSSALASKATGYPLAYIAAKLALGSTLVELSNSVTKETTACFEPSLDYVVTKVPRWDLRKFESCDPLMGSAMKSVGEVMAIGRTFEESLQKALRMVDEKAGGFDESVCHFFSTDEDCAPSLPGSDFKTSSSGECMRGGCGRTDSGAERQAALLEAELRRPSPNRIWALALAFQLGWTVDALHEKTKIDKWFLSKLQNINDIKRQLTQLTLDDLTRADFFYIKKYGFSDRQIAQYLMNSPSAAALSQFDVRRRRLHLGVRPSVKQIDTLAAEFPAHTNYLYLTYQGIDDDVSPLAATPSVSAVFAGARAEKREEENAETCRDDEDESLLRRLSKSSSARLRTGEGDAPGKQCFVVLGCGCYRIGSSVEFDWSAVSCVRTLRSLGHHAIVVNCNPETVSTDYDVSDRLYFEDLSLETVLNIWDIEAPAGVIISVGGQTPNTLCSALEKQGVRIVGTSVAAIDCCEDRHKFSRLCDELNIDQPRWKEFTDLRTAKAFCQEVGYPVLVRPSYVLSGAAMRVVTDDEQLDAFLKIAAVVSGESPVVISKFVENAKEVEFDSVACRGEIVNFAISEHVENAGTHSGDATLILPGQKLYVETIRRVKKISQKLARALQVSGPFNIQFICKQNDVKVIECNLRASRTFPFISKAFNVNLIDLATKVMIGAPVTPLPIHLMDLSFVCVKVPVFSFARLRGCDPVLGVEMRSTGEVACFGASKHEAFLKALISAGVPLPLEKRTILISAGPLWSKMELEPYFKILLDLGFTIYATEGTYRFLMNSVVRGQGTHLPGNASPASDSGLRTPTTAESDADACIRAKYASRIIRVRKPIVGSNESHNGGHQSPHALSLIESGKVEMVINVPDSMNHRAATNGYLMRRTATDCGVPLLTNVKVASMFVEALNKKEAKEAQGRSFWDIRSWDEYWPQK

SEQ ID NO: 4613 - DNA, 5100 bp, Toxoplasma gondii
  source 1..5100: mol_type = genomic DNA
atgggggtccaccatgcgctcgacgatgcgggggagatgcctcacagtggagggcggagagctgttgctcccatttaccctctcgatctggcaggacgtctgagacctgcaatgctggtgttagccgatgggactgagtttctcggatactccttcggctacccaggcagtgtgggaggcgaggtcgttttcaacactggtatggtcggctaccccgagtctctgacggatccttcgtacgaggggcagatcctcgttctcacataccctctcatcggcaactatggcgttccctcttcggaaaaagatgagcatggcctgccgaaatactttgagggcgaccgcatttacgttcgcgctctcgttgtggcggactacgacaacgcagccgtgacggcacactttcgtgcagagaacagcctcagtgcttggatgaacactcacaaagtcccggcgattgcaggagtcgacacgcgagcgttgaccaagcacctgcgcgaggtcggctgcatgctgggcaagatcgtcgtcctgagcgaagaagaagagcgtcgatccggcttgtcgctctcggctctcgccgcgcttccctcagcgactgcagcagagcaacgaggagagaacgacgcgacggtgacgcccgacaaagcagaggcccgcctaagagtggagaggcgacaagcagcgctcacgatgtgggaggaggcgatccgcaacaaggcgaagaacctgccatgggaagaccccaacaaagacaacctcgtcgccctcgtttcgcgaaaagaagtgcgcgtgtacaaatctactgtcgtggatccgaatctccgcgacgtcctcatcctctgcgtggactgcgggatgaaatacaacatctaccgccagcttctccatagcaaattcgagcactgcaacatcattctcaaggtggtgccgtgggatttcgactttggcaacgacgaatttgacgggctcttcatcagcaacggtccaggcgaccctgagagatgcgaaaaaacagttgctaacattcgacgcgtcatggagcgaaagatccccatcttcggcatctgcctaggaaaccaacttcttgccctggctgccggcgcgagaacgtacaaaatgaaatacggaaacagaggaatgaatcagccggtgatcgacttgcgaacgtcgagatgctacatcacaccccagaaccatggctttgccgtcgacgagagcacgctgcctcgagatttcctgccgctctttgtaaatgcaaacgaccgttcgaacgaaggcatcatccatcgcacgctgccttttttctctgcacagttccacccagaggcgtcaggtggtccgacagacacgttttacttatttggcgacttcatcgcctcgattatgaaggcgcagacgctgaagcaggtccacacgactccgttctcctttccgcagaagttccagaaagttctgcttctcgggagcggaggcctgagcatcggccaagccggggagttcgactacagcggctctcaggcgataaaggcgctgaaagagcagaacatctttgtcgtcgtggtgaaccctaacatcgccacggtgcagaccagccagcacatggccgaccgggtgtacttcctgcccgtcacggatgagttcgtgacgaaagtcatcgaaaaggaaatgcccgacggcattctctgcacattcggaggccagacggccctcaactgcgctgtgaaactccacgaacaaggcgtcctggcaaaattcggctgcaaaatcctcggcagtccaatcgaagcgatcattgcgactgaggatcgaaaggtgtttgcggcgaagctggaagaaatcggagaaaaagtggcggagagcgcggccgcgacaaacacggaagaagctgtgcaagcggcgaaggccattggctaccccgtcctcattcgcgccgccttcgcactcggtgggctcggatctgggttcgccgaggacgaggagaccgtccgacgcatttgcaaggaagccttctcccattcttctcaggttttcgtggacaaaagcctgaagggctggaaggaggtggagtacgaagtcgttcgcgactgcaagaacaactgcatcaccgtctgcaacatggagaacttggatcccctcggcatccacacgggagattcgattgtcgttgctccttcgcagacgctgtctaacgaggactactaccgcctgagagataccgcgctgaaggtgattcgtcacttcggcatcgtcggcgaatgcaacatccaatacgcgctcgaccctaactcggagaaatactacatcgtcgaagtcaacgcgcgtctctctcggagcagcgccctcgcgtccaaagccactggctaccctttggcctacattgcggcgaagctcgctctcggctcgactttggtggagctcagtaactccgtgacaaaagagacaaccgcctgcttcgagccttcgctggattacgtcgtcaccaaggtgccgaggtgggatctgcgaaaattcgagtcgtgcgaccccctgatgggcagcgcgatgaagagtgtcggcgaggtcatggccattggacgcaccttcgaggagtctctgcaaaaggcgctcagaatggtggacgagaaggccggcggcttcgacgagtcggtctgtcactttttttccacggacgaggactgcgcgccttcgctgcccgggtcagacttcaagacgtcctcctctggagaatgcatgcgtggcggctgcggacgcacagactccggcgccgagcggcaggctgcgctgctggaggcggaacttcgccgtccgtcaccgaatcgaatctgggcgctggcgctcgccttccagctcgggtggacggtcgacgcgctccacgagaaaacgaaaatcgacaaatggtttttaagcaaacttcaaaacatcaacgacatcaagcgacagctcacccagctcaccctcgatgacctcacgcgcgcagatttcttctacatcaagaaatacggattcagcgaccgtcagattgcgcagtacttgatgaattcaccgagcgcggctgcgctgtcgcagttcgacgtgcgtcgtcggcgactgcacctgggcgtcagaccgtcggtgaagcaaatcgacactctcgcggccgagtttcctgctcacacgaattacctttacttgacctaccaaggaatcgacgacgacgtctcgcctctcgccgccacgccgtccgtctcggcggtcttcgctggcgcgcgagccgagaagagagaagaagaaaacgcagagacatgcagagacgacgaggacgaaagtctcctccgccgcctgagcaaaagctccagcgcgcggcttagaaccggcgaaggcgacgcacccggaaaacaatgttttgtggttctaggctgcggctgctaccgcataggatccagcgtcgagttcgattggtccgctgtttcgtgtgtccgtacacttcgctctcttggccaccacgcgattgtggtaaactgcaatcccgagactgtgtcgacggactacgacgtgagcgatcggctgtatttcgaagacttgagcttggaaacagtcttgaacatctgggacattgaagccccggcgggagtgattatttccgtgggcggccagacaccaaacacgctgtgctctgcactggagaagcagggcgtgaggatcgtcgggacgagtgtggcggcgatcgactgctgcgaggacagacacaagttctcccggctctgcgacgagctgaacatcgaccagccgaggtggaaggagttcaccgaccttcgcacagcgaaggccttctgccaagaggtcggctacccagtcctcgtgcgtccttcctacgttttgagtggtgctgccatgcgagtggtgaccgacgacgagcagctcgacgccttcctcaaaatcgcagctgtcgtcagtggcgaatctcccgtggtcatctccaagttcgtcgagaacgccaaggaagtggaatttgacagcgtcgcttgccggggggaaatcgtaaactttgcaataagcgagcatgtggagaacgcgggtactcactctggagacgcgactttgattctccctggacagaagctttacgtggaaacgattcgtcgcgtgaagaagatctcgcagaaactcgcgcgcgcactccaagtctcaggtccgttcaacatccagttcatctgcaaacagaacgacgtgaaagtcattgagtgcaacttgcgagcgtcgcgtactttccccttcatcagcaaggccttcaatgtaaacctcatcgacctcgcgacaaaggtgatgattggcgcaccggtcactccgttgccgattcacttgatggacctttccttcgtctgcgtgaaagttccagttttctctttcgcgcgtcttcgcggctgcgacccggtccttggcgtggaaatgcggtcgactggagaagttgcgtgcttcggagccagcaaacatgaggctttcctcaaggctctcatctcggctggtgtgccgctgcctcttgagaagcgaacgattctcatcagcgcaggccctctgtggtcgaagatggaactcgagccgtacttcaaaatccttttggacctgggcttcacaatctacgcaacggaaggtacctacagattcctcatgaacagcgtcgttcgcgggcaggggacccacctgcctgggaacgcgtcgccggcgtccgacagcggccttcggactcctacgacagccgagtccgacgcagatgcgtgcattcgcgcgaaatacgcatcgcgcattattcgcgtgagaaagccgattgtcggatcgaatgagtcgcacaacggaggtcaccagtcacctcacgctctctccctcattgaaagtgggaaggtcgaaatggtcatcaatgtgcctgacagcatgaaccaccgagcggccacaaacggctacctgatgcgtcgcactgcgaccgactgcggagttcccctcctgacaaacgtcaaagtggcaagcatgttcgtcgaggccctcaacaagaaagaagcgaaagaagctcagggtcgctccttctgggacattcgcagctgggatgaatactggcctcaaaaataa

SEQ ID NO: 4614 - DNA, 24042 bp, Toxoplasma gondii
  source 1..24042: mol_type = genomic DNA
atgggggtccaccatgcgctcgacgatgcgggggagatgcctcacagtggagggcggagagctgttgctcccatttaccctctcgatctggcaggtcagtccgccgtttcgttcagacttccttctcgtctgggttctttgtttcacacgcctggccgcgtctcctctccgcttcttggtgtgcagcctcggtttctcccctttgatcagctgtctcggttgcgcttccgccccgtgcgtcgccttccgtgtttgcttccaattttctcctggcttgctcgtgtgttcgcgcccctccggggagaccggcctgtctgctgccgacagagaggcagctgtgaagggcgtgatcatcaactgtctcgacggagagacacgacgtctgtgatgcaagcaaatgagcgcgtgtatgcacaggtacccgcgcatactgaaatattttcgtatctgcagatccacaggcgcatgcatgcgcccaactgtacccacgcgtgtttctacatagttgtggagaggcacatgcgtctgcatgtgtgcacgttgtctattcttgcgaacgataaacctggtggcgatccgtgtgttattttcaagaagtgatttcgacgcaggccatctcgctcgtcgctcgtttcctgtgtttgtcggctgctcgcaggacgtctgagacctgcaatgctggtgttagccgatgggactgagtttctcggatactccttcggctacccaggcagtgtgggaggcgaggtcgttttcaacactggtacgtttttctcgaatttgtccagaaacgctgacgtttggcgtctctcctctccagaaagggtgcattcggtctatccgctgtgtgctgcagcgattggtcctcctcttacaagcgcgtacaccaccctatgcagcctcatgcaccgccatctgtcaacgcgtgtggggaccgccaccacacgcccatgtatctaccttcgataaacatatttatgcatatatatatatatatagcatatatatatatatatatagcatatatatatatatatatatatgcatgtagatactcaaaatgcatgcatattggtacgtctgttcacctgtatttttctgcgtgataattagatacccctgggttgcgtcaccatgagctgtgtatcgttctgggtgcatgcgttgttgcgggagtgttcgtgcgtcgggaaaggtagtggccgacttcttgtctttggcgtggttaggtatggtcggctaccccgagtctctgacggatccttcgtacgaggggcagatcctcgttctcacataccctctcatcggcaactatggcgttccctcttcggaaaaagtgagagcagacagcaagaaaacgaagagactagcagaaccccgtacttcgtggctgatccacatcagtgagagtcgaggagggagagtcggatttctcttgcgacgcaacgtcacaggaaagcaagtctggcaggggtctccgctttctcacatgccgaatgcgcacacaaatcattcatacgtcactacaaaactgagtcctacgtgagaagagcaacgtcacctctccgtgagacatatacgtgtttctatatacatatatacatattatgtatatatttatattcaaatatatatatatatatatatatcaatgtgcatatctaagtttatatatgaacgttcatctgtctttcgggagagtatttccctaaatggcagatgctaagacgcctgtacacctgcgtgcaaaggtgtttacgcgggtgtctacacgtgagcgaagtgattgctacacacatgtatatatatatatatatatgtatgtcgctttacagtgtttgtttttctgtacatctaaagtcgtctaggcatcgatatgcgatgtgcatttcagcgtatttcgtgtgtttcatttccactcttcaggatgagcatggcctgccgaaatactttgagggcgaccgcatttacgttcgcgctctcgttgtggcggactacgacaacgcagccgtgacggcacactttcgtgcagagaacagcctcagtgcttggatgaacactcacaaagtcccggcgattgcaggtgcgaaaacatcgaggccgaagtgtctgtagtgtcagatgcgcctctggacacgacatcctctttcgatgcttgtctttgattttcacttaattttctcttcgcaagtctgcgaaggaacgcctgtctgtacatctcgatgcccaggtggctttctcggccatttggaggaactgtcttggatccgcgtagtaggcatgtatgagggagcagcttctctttcttctgaattgtgttccacttgtaagtcggttcgaccacgagcagtcaagaggctcttaccgtgccaccgagtcaacgtcgcccatcacagaccggcttttgaatgcctttttcttcaggctccattaatgcacgtctcactgaatccgtgctcgtcaatttggacagctagatctgtgtagtccctagagactaacttttggagggagactaacaatacagctaggttgctctacctcggctatgtttaacgcatagttcacggatcactgttgccactggtccttacagagagagcacacgactgctcacgtgcttgtcatggagacacatctcgatcgtgtatgtttcacttcagttctgcagagccgttcagtgtatgtctgccatgacggggaggggtatctcaagggtgtattttgaactgtatttccacggtgtacggggcttgaagtactggcgcatctatgtctggaggacgggacgtggtttagttcgtgtctcagtgctcaacagcgtccggatctctggcatgctgttgccatcctgttagttgctggccttcgcggctactctttctcctttaggtgcacctccagtgtctccagttcagctggtgttcccttgccgactgttgctgctctgtcagggctttgtaggtccccgcctcactctcgtttccgcttctctgttttctgcgtccgtgtgtgtctcacctcttcctcttcgtttccatctcttttcttgtctcgcctttccacggctctcgtttgctcttgaaacgctgtcggttgtcgtcgttccgcctcgttctctattcggctctatcttcgtcgttcgtcttttgcttcttttcgacttcccgactcctgcctgtttccggctgtatcgttttctttttcaaggagtcgacacgcgagcgttgaccaagcacctgcgcgaggtcggctgcatgctgggcaagatcgtcgtcctgagcgaagaagaagagcgtcgatccggcttgtcgctctcggctctcgccgcgcttccctcagcgactgcagcagagcaacgaggagagaacgacgcgacggtgacgcccgacaaagcagaggcccgcctaagagtggagaggcgacaagcagcgctcacgatgtgggaggaggcgatccgcaacaaggcgaagaacctgccatgggaagaccccaacaaagacaacctcgtcgccctcgtttcgcgaaaagaagtgcgcgtgtacaaatctactgtcgtggatccggtgagtgacagagagcccagggaaagacgtttcacgtgcgaaagcgaaacgcagtttccacagtccttgtttagatttagcgtgggacatgcacaagttgggattctgcggaatgccgctatctggggaggggagtatagacgccgagttcaactcctggcttcaatctcccctcaatcgaggcgtagcgcaacgcgctcgctttgcactggtttcgccgccccggaggtccgtgctgagctgtacgtacatccggggtgtgtatgcccgttgcgatcgcgtttgagtgttttcggggtctgactgtgcgtgtccggggcctcccgggcggcgcctgtcgaatgtgcggctcggctttgcccgccttctttctccaaagtgtgtctggactgcctttctgtgttctgtcggaatctcaagtctgggctgtcggtttcgttgcctgaatctgcagaatctccgcgacgtcctcatcctctgcgtggactgcgggatgaaatacaacatctaccgccagcttctccatagcaaattcgagcactgcaacatcattctcaaggtacagctgtcgctgctctgactgcattgactttgaaactctcattcctgatctgttagctctcccggcagttcgcttgtattttctgtttcctgtggcgcccacccgtcaattcccctttctgcggcgccgagcgctcttcagctggtactgggaaatggagatgtgtgtccagcagtatcaagacatacagaagtatactgatgtgtacacgtgaatctccattctgtttatgcatgcatgtctctctctctctctctatatatatatatatatatttgtacatgtatttatgtgtgtgcgtgcgtttgaatataagtacgtattatctacaagtttgcatgtttccgtacgaatgtccgcaggcgtgtgtgtctggttacatgccgctgaatctcactattcaattaaacagttgagtgtggagaggtaagcgagactgtgactgcgcaggtgtgaaaccgttcaggagcgcatgcgctgtgcgtgtctctcaggtggtgccgtgggatttcgactttggcaacgacgaatttgacgggctcttcatcagcaacggtccaggcgaccctgagagatgcgaaaaaacagttgctaacattcggtgtgtgctgcagagaaaagccgattcgttcgccagagtcaggaacagcacagtggcgcatttccatttccgtcttcgctgtagacacgcaaaaccatcgcgatttgcagattggttgagcttgctctctgagtcgcgggaaactgttccttccgttccatggcgacccaggcacagagaagcgtgcatgcaaaaaacaacgtggagtctctccgttttgtctctgctaacttagtataacttagacccggcaaacagcgacatgcacgagttaaacgcgtagtccatctcttacatgaaatggactctttagaaagcgcaagacggtgcacgctacaccagcctcgttcgtaggcttgcgtattgagttcacgcgattgaacaccgaattgtcgaggcgggaagttcgcgtctaccacatattcatctgagttccatctcgggttgctccggttcgggccaaggtgactggaatgcccggtggctgccgggtactatgtgcttccccgcggatctcccatgttctcttgtgtgggcagactgcgcagcactgctggtggctgcgtaggttcatgcccttacaatgtaaatcccttttctaccgttcgttcttcctcccgttttcagacgcgtcatggagcgaaagatccccatcttcggcatctgcctaggaaaccaacttcttgccctggctgccggcgcgagaacgtacaaaatgaaatacggaaacagaggtaagcgttgtcgttcgtcggtcacactgattgtacgccgtttcaggtgtacgtacacctctttcaccggcagcgaggcgccggtccagggagcgtcccgcgacgtgggtggcaggccagtgactagcgacggcgaggcgaagagggaaaatagcatctccggactctcatttctgttttgccgttgcaggaatgaatcagccggtgatcgacttgcgaacgtcgagatgctacatcacaccccagaaccatggctttgccgtcgacgagagtaagcggcgacaacattccatctgcgaaatctaggtgccatgacctccatatgccgttatcgtagacataatgttgatatgtagatgcatatggatacgtcgagagaggtacagattcacttttgtagatgtagacggctataaatcaaagtggttcatgcatctgctgttggttgtattttgacagcattgtgaaagggagtggtgttcgatagaacgcaaatgtgacgcaattgtatccgtaagaccctgagtttcattataagtaggtattgcctctgtacaaatgatccgcgagccagaactgtataactcaaaccgaataaacagagtgtctgtcgctgtgaatacgaatggtaacagtaatccatatattgcgcctagaacgtaaccgatgtggaataacgtaaaaatgcgtgtttgagccctccacgtcagcggtctgtcgattgtgaattagcgaagccgacccgtcgatgaagttcaacagtcagccagatattcagtctctagaacctccacaaaggatgatgtcctccaggtagcgaagataccaactgtggtgttggagaatggcgtttcaaagccggtagcgttgcagacactcttgtgtcctcgtgggagtccgtgttcgaggcgggcagttgctacagcaagtagatgcgtagaacgaagcgagacctccacgcggggatttaccttttgacatcagttctggaagactgcagatcctttgcacagatgcaatatctgcttacggtgtggcgcttacaatacatggtcgagctatgctcctgtcggtctcagtgcggccttcgtcagatgacagatgtggacacctgcctatatgaccctgtgttgaacctctcgccgtttctgcaggcacgctgcctcgagatttcctgccgctctttgtaaatgcaaacgaccgttcgaacgaaggcatcatccatcgcacgctgccttttttctctgcacagttccacccagaggcgtcaggtaaggcggcgatacttcttcgactgaaataccgacgttgcagatcagcgacatctctttccgttggcgtcgtttcaatgatcagtgcttgaaggcatcttggcagcgtttcgtcggaccaatacggcggaactggagctcgacggtacaaggaatctgtgactgccgatgctcttctcgatgatgcaggggcgacagttcctttcatgagggaaacatgtgcttgtgtcatcagttcagttcctcataactggaggcatctgttgggtcttaaataaagccgcccgctaagaaggatgctgccttgcgacgcaactcgtgtgtcaccaactgcatcgcgatgggagagtttttcctctgagacaaaacgaggatggacctccgaagttcgtgtacgcagtctgcgagtcagtggggtgccgacgcacgagacgaagacgagccactcagagattattgtttctcacttttctgcctcggcgaagaagcagcgcatacccatcggtgcccctccgctgggcgtctcgtgcgttccctgtcgctggcgcggcttcgtcaacacagtgcaccgattttttcttctgctcgtttgtgacaacctagagagctccagtgagatcgaggagtggcgcgagatgtgagtttcacgcggtggaggccagatgatgtttcgtcaagagctgcgccgcagtctaccacgcagcgcagaccccgtggggtgtgtccttcgcgcgattctttcctggagtctgtggggtgtttatacactcggcgtccctctgtctgtgccttctggctcaggtggtccgacagacacgttttacttatttggcgacttcatcgcctcgattatgaaggcgcagacgctgaagcaggtccacacgactccgttctcctttccgcagaagttccagaaagttctgcttctcggtaaggcggtgttcctcccgcatcttgagggaaggcgagttcttttaaagtgcagaaagccctttgcgggggtcatcagagaaggaacgccatcggctgcatccttcttggtttctcgcaaatgcgtctgtggctggccgtcgcgtggtaccttctgaacgcccgtgtggaggtttcccgacgctgtcatctctgccaaggtgtcgtcgtggacgttcaagagtgcgagagcggccctgccgactgtcgcagagagcgcggctcatgtcatgtctcccttgtgcattctccctgagcttttcgcgggctctctttcgacctctgtctccgccgggatcatctgtttaggaggaccgtgtcgtggtgactgtgccggaggctctgctcgctcaagtgaggaggtcggggtaaggcgggaagtcggctgtgtgtgcgtggtttatttgcttcgtagggagcggaggcctgagcatcggccaagccggggagttcgactacagcggctctcaggcgataaaggcgctgaaagagcagaacatctttgtcgtcgtggtgaaccctaacatcgccacggtgcagaccagccagcacatggccgaccgggtgcgttgaccgcgcagacggattgcgcagagtggcgtcgagggagcgcgaacgaaaaaggaggacgcagacgccagagaagacacagagaatcagagagacagcgagagacagcgagagacagacagcgagacagaagatcaatcgggaggcaaggaggagagcgaggtagagagaaaccgcgagaaacacagagaggagcagagagctaacaagacagaaacaaagcgtggtgcaggaagacgcagatgagagggagagacggagcccagagcagagacagaaagacagagcaaagagagacacagacagaacagagagagagagataagggtggaggtgaaggaataaaggcggggcttgagcgaacggtgaagcattaggccgtggaaggtgacgaaagtgcgatggaggcaggatggtctttgtgaggccttctttgtcggaagaagagagtggacaccacgtatttccactgctgcgttgcgtaacgcgtttatgagagagtactgcggttccccagagactggcggaaaccaaggagtcggcaggctttctcgggtctctctcccctctgcgttgtgagtttcctaacgtctgtcgacttcgggaagtccgaaactctccggagaagacacacgcaactccaaactgcgagtggagtcgagccgatccagtcgagtagtagcttgcatgaaatgtgtcgagccgggtgcatgcaattcattttttcaggtgtacttcctgcccgtcacggatgagttcgtgacgaaagtcatcgaaaaggaaatgcccgacggcattctctgcacattcggaggccaggtgcgtttgcgtgtgtgcaacggctttttcctcgatgaacgtaactaaatgcgcgaagatataacgaggcctaggcactcgcaaatggacaatccatccatatgcatatatattcatatatatgcatgtttaatatatatatatatatatatatatatataataatatgcgtatggggctggccattgaggagatatgtatgcagctgttcagaggagtagcgtaggcgaacacgtttgcatgcatagagttctggacgaagcacgtgatcgtgcggatatatgtaaatgaggttgtgggtgtatgtggggacagcgatatctggacagggtacggctttttttttcactttatggcatgttcagacggccctcaactgcgctgtgaaactccacgaacaaggcgtcctggcaaaattcggctgcaaaatcctcggcagtccaatcgaagtaagaatgtattcatatatatacatccatatatatatatatatatatatatattcgtaactgcataaatgcacatattcatagtgatacatatatatatgcacatagacatatgcaagtacatccgcgcacacatatgtccatatatgtgtgtatatccatatataaatatatatccatatatatatatatatatatatgtagagaaatgtgtgtgtgtatcagtgcacgttacgatgcacaaatttgtatactggtgtgtatttaggtatccgcgcatttcgagtttcgtgggaagcacgcggtgtcttgtttgtcttttttaggcgatcattgcgactgaggatcgaaaggtgtttgcggcgaagctggaagaaatcggagaaaaagtggcggagagcgcggccgcgacaaacacggaagaagctgtgcaagcggcgaaggccattggctaccccgtcctcattcgcgccgccttcgcactcggtcagccaaagaagagaccggggagtgaagacgagcgaagaaaaggggcgcaaggtcgacgagagcaatgagaggagacccagaaaaggcgcacacagaacggatgcagacggaaacagacgaggcgacaaaagaggcagtcgatgacagagaagaatgcgagggagacggaagcaccgaagacgaagggaagagaactggccagaaacgaaggatacggatttcacgttcaagtgatgtcaacttgcgtgtggactatcgcaggtgggctcggatctgggttcgccgaggacgaggagaccgtccgacgcatttgcaaggaagccttctcccattcttctcaggtccggtcaacttctcgtagtgcatgcgtatacgcacatcagagtaaaatttgcatatatatatatatatatatatatataagtatatgtatgcacacatatatgtttcagttcttatctgcgggtgtacttgtgcatgtccgcaccggcgtcgtgtgggcagatgtgaacgtctggagagagaggtcgcccgttctgaatgcgcgtgcatgcgtttctgacaggcgtgtctgcatggctgcggaagccgaatgaaaccccacacttccgaaggaatttcgcgtttcagccggttcgtttgcaggccgagtgtcgtcggggaggcttcctcgttgtgttggtgtgtgccggtccagtggttctcgcgcgaagccccgagtgcgtcccctataagactgaaaagcgccaagtcgagctggcggaactctgagaatttacgttttttcaggttttcgtggacaaaagcctgaagggctggaaggaggtggagtacgaagtcgttcgcgactgcaagaacaactgcatcaccgtctgcaacatggagaacttggatcccctcggtgcgtctcgtctgtgtgcatttgccgtgtttgctcttcaactgtggcttctcagctctgtcgaggggtgcgctgcggaggctcgctgtacaccacgaattgtttctggcctctctgttaacgagcgttctgaaacgaatccccacacaagtgcatgctccctctcgtcctctcgctgcttgactctgtcgctgcgggggaatccctcgtaccgtgctctcgctgtgacgacctctgagtggacgcgtctctctcggacttctctttgtctctcgccagacgcagtgattccaagtctctctctttttgtgcagcgctgtctctgacgaacgctgtctatcggcgtatctctccttctccgcttctccagagcttggcacttctctgtataaagatttacatatatatatatatatatatatatatatatatatatatatatatttgaatgtttttgtatatgcactccatctggataattcagtcgtcgaactctattgtcacagcgttttggtcacttaaaccggcgtccttcgtcgatggtttgcgcatgcgctttttgcgtccatgtctgtacacccgcgtgtggattttttcccctcaggcatccacacgggagattcgattgtcgttgctccttcgcaggtgagctgtcttcgcttgtgtttttctgtttttcatctctctttatacatttctcggtccgatatttctgctctctcatggcctctcttttgccattttcctcgttgttttctcttatccctcgttcttcctcttgttatgtcttcttcttatcctttgttatcttttgtccgcgttggtctattgttgtctccgcttcaaatcccttcgtctcccacacaagcgcgcgttttcttctttgctctctctcttcagacgctgtctaacgaggactactaccgcctgagagataccgcgctgaaggtgattcgtcacttcggcatcgtcggcgaatgcaacatccaatacgcgctcgaccctaactcggagaaatactacatcgtcgaagtaggtgacaagagagtgcaaacgaaaaaccacgggaggcgaagggaacgcggtcttacagaggatgatgccgcgaggaaaggtggacgaacaccctgaaacaggagagaggaaagcgagaaccggacaggctcacaccaaagtcagacagaggccacagagcgagaaggacagggaggtgcagaagcggagagaccggccagaaaagagagagacaggggcggagataagtgctacagaaagtcgagagaagctttctcgatcctagctcaggttcgatgtcacctgcctcgcgctgtgcggcatggccacacgcatgctgaaagtcaacgagaaggtcgccaagcagttctacaaatcaagcactgtccagacagctgctgacgggcattccgtttttccttttgtgggcgtttgtgtcgctgtctccgacgttcggacgtcccgcgactacagcgtctctgactttccagacgcctcgctttctcatctcttctcccgcttcgctgtcttgtgggccttttcctcaccgcaggtcaacgcgcgtctctctcggagcagcgccctcgcgtccaaagccactggctaccctttggcctacattgcggcgaagctcgctctcggtaacgtttgtctcccttctgtttcgtcgaaacttctgagtggcttttccgaactgttcgtcccagagtcgatccgcatggcccgctcaaagcccagcatcccctttcattgctgctctccttgatgcttcaagcgtgtctgcacggccttccttctgttcttaaattcgcggcggtgatgtgcgtttccgtctaatcttctttgtctcgtcggctgagtgaggtggtgcttcggtcggttttcatcctcgagaactggcagtgtgtgtcgcatgttttctctctccatgtaggctcgactttggtggagctcagtaactccgtgacaaaagagacaaccgcctgcttcgagccttcgctggattacgtcgtcaccaaggtgccgaggtgcgaggacacaacgcacacagatagaagttccatagggactcccaggacaccagtggtttcttccctcttctctttgtggcccgactgctccctcgttctctctttcctgcctctcttcatctcttcctctgtttctctcttcgttgttcctgtccttcgccgtctcttccgctgttcactgttggggtccgttccagttcggccgtcgcttgcgtgtcaacgtgtgtatggttctctctcctcaacgtcaccacgtcgccagcgtccttgcccaaaattgtttctgccttctgcaggagctcaacgccttctgttagatgcctctctgacgcatgctttgcatctctgcactcgatagagacttgccgttttgaggaagaagtttccagagcgtctgagagagtgtcctcgcgcgtctctcgacgtccagcgaggctcgcgcctcctggcggtgaacagattcgtgttgaatatgtctttctgctctcaggtgggatctgcgaaaattcgagtcgtgcgaccccctgatgggcagcgcgatgaagagtgtcggcgaggtcatggccattggacgcaccttcgaggagtctctgcaaaaggcgctcaggtaaaccacaaagttccaatcatcggcatccgtcgacaaacagttgtcccagttgaagttattgtagccacatctctcttctccgcatttcctctctcttcctcttctccctcttgttctccctcttggtctcccttgtgttctctttcctgttctctgtttgcgacgtttcttcgactgtgtctcgctgacgtccgttctggtggcctgcgttttcgcctctgttcttcagaatggtggacgagaaggccggcggcttcgacgagtcggtctgtcactttttttccacggacgaggactgcgcgccttcgctgcccgggtcagacttcaagacgtcctcctctggagaatgcatgcgtggcggctgcggacgcacagactccggcgccgagcggcaggctgcgctgctggaggcggaacttcgccgtccgtcaccgaatcgaatctgggcgctggcgctcgccttccagctcgggtggacggtcgacgcgctccacgagaaaacgaaaatcgacaaatggtttttaagcaaacttcaaaacatcaacgacatcaagcgacagctcacccagctcaccctcgatgacctcacgcgcgcagatttcttctacatcaagaaatacggtaaacgccttcgcgcgctgtcgagacactggggcatgtggctcgggtgtcttcggggtggccgtcaaacagtggggtgtttcccagtcgcatttctcactcgtttgtacatctccgaaaacacggcgacgatgcgcaagccgaaggggacaagagacaagcgatgctccatgttttcaaagctcctgtctgttccccgtctcttgtggcaatcgtcgaagatacgctaaccgcagactggtggtcaaatgttttttttcgttttgggatccactgtggttctcatcttctcgtcgtctcttgtcttcgtctctcgctctcggcttctcgtcttctactcggtctcccctgctccgtttcttctcctcgtccgtgtctcatgttcctcttttcttctcgccttcttcgcttcgtctgtgcaacgaccagactgcgacaatccctccccgttagtaggataggccgcaggtttctctctgtttcccaggattcagcgaccgtcagattgcgcagtacttgatgaattcaccgagcgcggctgcgctgtcgcagttcgacgtgcgtcgtcggcgactgcacctgggcgtcagaccgtcggtgaagcaaatcgacactctcgcggccgagtttcctgctcacacgaattacctttacttgacctaccaaggaatcgacgacgacgtctcgcctctcgccgccacgccgtccgtctcggcggtcttcgctggcgcgcgagccgagaagagagaagaagaaaacgcagagacatgcagagacgacgaggacgaaagtctcctccgccgcctgagcaaaagctccagcgcgcggcttagaaccggcgaaggcgacgcacccggaaaacaatgttttgtggttctaggtaggcgacgaaggcaagaaactttgaggatggagagacgaagaagcattgaagggagagaaatgcaaagacgggagagagatcgagaaccggaggagaagagagaggaatggcgacagagatcaagggacgagttggagacgatgcatgaagcaaaggcgagcaaaaaaggcgattcacggaagaccagaatcagacgacaagaacatgtctttgtttatcgacgggcacacctctttttcttttctctcaaggacctgtcggtgcttgcgcaccaggtactgcgatatatatatatatatatatatatatacatgaacatccacagatatgcttgggtagatacagaagtacatatatatacatatatatacgactattcatgcatatgcatgtgtatatgcttttttgcacctttttgtgcgttggtattttttggtgtgtttcggcaggctgcggctgctaccgcataggatccagcgtcgagttcgattggtccgctgtttcgtgtgtccgtacacttcgctctcttggccaccacgcgattgtggtgagtattcgccgcctctcagtggtagatcacttcgcaaacgtttcggtccttaggtcaaggaatttgcgacaagcctctgcctcaggttcctcgtgaatagcctcagactatttttaaacaaatgcagcgatgcattaacgcatggggacactgcatgtgagatgagccacggttccgcgaatatctttatggatatgtatcaatggatacataaatatatatatatatatatacatatattatgtacgcagtggaggccatgtagaaatgggcatttttacctctattcacgaataagagtaggtctgtgcatgacgacgacggacatgaaagtgatgctagacagtatatgagcatttaaaaggtaattattcataaaagtgtttattgaacgttgttcgtcctgctcttgtcaattcgcattccgtggaacaggtaaactgcaatcccgagactgtgtcgacggactacgacgtgagcgatcggctgtatttcgaagacttgagcttggaaacagtcttgaacatctggtaggtttctcacgcgtagctgtccgattgtgggctctccgaatataagccgaatcgcggtgaccagcctggatgtcggccttggacgtgtgtctggcccctcagattccccgaacattcagagagagctcacatggcccgtaggtttggtgtctctcagtgtgtcatgcagtgcatcaaagttcgttctttgaattcgcacatcccgtcgatgtctgtgggtccgccttggatggcgccgcctcgttggtatttgaagtcccaaataagaggcacagaaatcactgttttcgctgtgtggaagacacgttcttttgtgtgtcccagatttctctcttcttgtctttcttctcacgcttctcttctgtcgtcatctgtgcctcgtgcacgcgtctctgaactcgtcgtattctcctctcttgctcgtgtctctttccctcctgtttgactttcttttccgtctcgcttcgcttcccttgttctcccgtcttgccctcctgcttcacgcgttgtctgtcacgtctggctttcgttggtcgcctctgttttccggagttttctcctcctccactctcttctttatctcagaaagactttgaagatttaaacaggggtccacctcctattctacactccggagaagaagtcataccttcccgcgcggtggtggattccattcgctatcctgtgtctcctgcctactagtcaagagatgttgcgcgagtgtgtgcttctcgttcgagggtcctctgtcgtgcgtttttcgttcgtttccagggacattgaagccccggcgggagtgattatttccgtgggcggccagacaccaaacacgctgtgctctgcactggagaagcagggcgtgaggatcgtcgggacgagtgtggcggcgatcgactgctgcgaggacagacacaagttctcccggctctgcgacgagctgaacatcgaccagccgaggtggaaggagttcaccgaccttcgcacagcgaaggccttctgccaagaggtaagcggaaacacatggttcattcggggcgaaacaagagaaaacgggagatggagatggggacgaaaacggagacgaacgagaagcaatcaaatggaaggcaaagcagccgagaaatagagagacacggagacgcagaaatgtgcgcagaggacagcgaaacgcagatgaagcggggggagacagagcggtcttcaacagcgcgcagtcgagttgaagaagagacgaacgaagaacggacgtcaaaacacacaaggggagcgaaccttggaggactgataacagaagacgaaaagtcgaattggaagataggaagtcgcaggagagatgacacaacctgtcgaggttccaaaggggtagcgtgtgcccaagagcaaaagcattcgccggatgtccttacaacgtgcttgctggcgcgacgacaccatcaggttacctcgaaagtaaataccgtttctgcatttttatcgaagaggtcttctgtctctgcttctggcctacgtaaaataaaaggcttgctctgtgaaagcccctgccggtccacatgttcgtaccgcacacgcttacagtggtgtcttgcatgcatttttcgctggccgtttttcttcctttcccttcgcgacggtctgtacgtacgcccgagaccccgttggtccacaggcgtccggcgcggtggtgtctctggtactccggcctcgtcgaacgtatgttttctcgcagtttgtctggcacgtgtttgaaaggctgtggattcgcaagtcgcgttttctgcgttcgttctcgctcttctctgcaggtcggctacccagtcctcgtgcgtccttcctacgttttgagtggtgctgccatgcgagtggtgaccgacgacgagcagctcgacgccttcctcaaaatcgcagctgtcgtcagtggcgaatctcccgtggtcatctccaagttcgtcgagaacgccaaggaagtaagaaaacgacctagacaggctcacgacttccacgcttccacgcatatccctgtatcgtgttcgtatctactttcctgtgggctacatgtctccgtgttcctatgcagtgatgtcagagatcttcctcgaaatactctcttcagctgcgtataggtgtatacttgcatgatatccatttatcttttgcttgcgtatctatgtagatggaaatgcatccgaatgggatatatatatatatatatatatatgcgtgtgttttcttataattatgtatatatatatataatatcgatgtgtgcaaacatgtgatctccgcttagatggggaactcttgagcaatagtgaggcaaacgaaacgaagttgtcaaaatcagcaggaaccaccgggatgaacctggtgcatgcttgcgtaagcataggcgtgcaagcatagtttcacatggtaggcaggagccggcattgttcggatgtatcgtcctctcctcgttccttccgtggaaactgcctttttggcttgcaggtggaatttgacagcgtcgcttgccggggggaaatcgtaaactttgcaataagcgagcatgtggagaacgcgggtactcactctggagacgcgactttgattctccctggacagaagctttacgtggaaacgattcggtgaggacgcatgaagagtgtgttgtgacacccgtccccagtgcgcgacagagaaaaagagacgaactttccaggaacgcagagagtcttcaaagattccgttcatgagtcgcggctggtgcatctcgcgcccattgttttcaaggacgctacgcgcccgaacgagtcgtgttctgtctcagcgtctccagttgctgaatgccgtggtgtcatcccagcaaacgcaactgtcgctcttgtcgagagcgcgagaaagagaacatgcgaaaagagcgtttgaagggagtggaggcggcacctgcatgtaatcgagagaaagaataatggcttagttgatgaaggacggtggagagaaagtgatcgaacttgaggcgcagtgagggcgcagagacagcgacaaagacatgtgaggatatccaggcaagtgtgatgggagagtcaggtagatatttgccagtggacaatattgctagaaatggagacaagatggatgcagggtgaacggacagttatcggtcggggtatacgagaaataaatgcatgttgaatgacttggatagatgagagagagagagggacgtagtggttccttggccttgcgccgccttgtcgtgaagggtcgacaccagtcagatggagattctgtcgcccacatcttctttagaagaattgaaaaagctgttcttgtaagttgtgaaggcacaaatgttttttgcgtgcagtcgcgtgaagaagatctcgcagaaactcgcgcgcgcactccaagtctcaggttcgtttttctcatacactatctttcgttgattgctcttcccctgcttctcctcaaaaacctttctttgcgtcgtgcgttcgatccggtgtcttctgcctttctgtcaggtgccaactgtacacggttcgagtttctgtcttctgagtcgagtgttcttcttcaccattttttcgtcggacttcgtgtcgctttgtgttatccgacagtcgatagacctcttttctccatcacgagaaagcgacgacgttgcctttcctatcgcagctcacccagtggaggcaaaccgcattggcggatctgcaattccaaaccagagttcagaggcgcctgagactgccggacgttccctcgagttcgtgtcagctgcatgcgttgcatgcgcatgcacagcgccagggacggggcacctgcgggtccgcttgcgagagggcgtgctgtgcttttctgcctttcttcaggtccgttcaacatccagttcatctgcaaacagaacgacgtgaaagtcattgagtgcaacttgcgagcgtcgcgtactttccccttcatcagcaaggccttcaatgtaaacctcatcgacctcgcgacaaagtaagaagaccaagggtattccacacgcgcctcaagttcccttttcaacacactcttcgacacacatctccgaataaacataatctgcgtgcatgtttctctagacaccgagagatctacacacgcgcatatgtatatacatatgtatatatatatatatatatacttacatatatacatacgtatgtgtgcgtatgattccactagaggcaaagctaccggtagggaccgattttgaggtggatttgtttcgttctttctcttcgtttccttgtcgtttcgtctccagggtgatgattggcgcaccggtcactccgttgccgattcacttgatggacctttccttcgtctgcgtgaaagttccagttttctctttcgcgcgtcttcgcggctgcgacccggtccttggcgtggaaatgcggtcgactggagaagtaagcaggctgctgaagaaggagacgctattccgttttcaagtcgggaagcctggcgtcgtttgaggcagatctgcattgccgtctactcggcttggaacgatagacagaggaagacacaagtgcgaggaaggggaaagggaggaaaacagcgaaagaggaggaaagaagagtacggcacaatgtgcgagcgaagcgagaagtgagtgagagtgtttagaagaacaaagtgagaaacgaaaatgaaacttctgggtatccttccctcaagcgactgttcgtggacaaacgcagttttcactcgagacgtcaacgcgttccgtctccattgcttgtctcctcgcgaccgtgttgcttttcctttcacaggttgcgtgcttcggagccagcaaacatgaggctttcctcaaggctctcatctcggctggtgtgccgctgcctcttgagaagcgaacgattctcatcagcgcaggtacgcaacgttctgtaaactaagcgattctttctgttcgctttctctctgtcgagcgacagcaaccttttcctgtctccttccctccctctcgagacagagcagcttccatgttccccttagtgttttttaacagccgcgtttctctgaagtcggcgcatgcatctactattgcagatttcgcttcgtgttcgtgcgagccgaagaaatgctgcccgtcgccctggcccttcgactctctctcctcgtcagtttcgctctctccatttccagctggcgaagagtttctatggacatatgtctgtcggtcgcgtgtgatgcatgcactgcctctcggttgtgacattttatcctcttgtctttgcaggccctctgtggtcgaagatggaactcgagccgtacttcaaaatccttttggacctgggcttcacaatctacgcaacggaaggtaagtggaggcgcactccatgaatccctttgcagttctctcttctttttcttctcacactaacagttggtgttcctatctatctacctacctctctatctatgtctctctggttgtctgtctgcctctcggtccgtgtatctgtgtatctgtcggtgcagctctctaagccgcgaacggtcgtgcgtatatatatgttcatctgcaacacaacgaacgctctgtatgcacgtgccatgtcgatatgactgtgtacgctggccgtcgttgtctgtgtgcaggtgtattgcttcgccgctgcagaacgtagcatatgtgtctttattcaacatttttgaagggatattgccttcggtttctttcagtggcatttagctaggattttttccttttttttgaaaggtagtgaagaacgtgtgttgacggccagggccgcagcacatgctgcgatgtctttcttttgcccatggtgtgtgtgtgtgtgtcttgtgtggtcgctttggcttttcttcattggactgtttttcgttttgtgtttcttccatttttccgttcttcaagtgcatgcgaaggttgtcaagcgtattctctcggaattggctttcacaaagctcttctgccccgctcctcgtttgtttccacctttcggcttctttttgttcaacgttcgcatgctcacacgcatgcacgcctcgatcttttcctgtcctgacgcagacaagtgctcttcgttttactgctgtccccgtttccgctgccccgccgtgacttctctcgttttgcgagttcacgtttcttctttcttcgtttttctggattttcttcggtgcccaggtacctacagattcctcatgaacagcgtcgttcgcgggcaggggacccacctgcctgggaacgcgtcgccggcgtccgacagcggccttcggactcctacgacagccgagtccgacgcagatgcgtgcattcgcgcgaaatacgcatcgcgcattattcgcgtgagaaagccgattgtcggatcgaatgagtcgcacaacggaggtcaccagtcacctcacgctctctccctcattgaaagtggtaaggcccggcagtgcgttttcgggtggctgtgcagacggggcatgcgattttttgcgtttctgagcaacgaggcgccagcatgtacacacagcccagtggtttatgtcttgtttgctttcgtgttgcagtcgcacatgcatgcactcttatgtgtatgcgcatctatcgtgccaaggtccattcacatgcctagttatgtgcatgcggaggttgagatgcatactgaggatggtcgatgtttaaacgattgttgacaggctcagctattgggagcgagcatggtttttctctgtgagagttcactggaccctagaccgtaaacacttgcagagactggctggaccccctcgatcgaaaccatgcatgcagcagtcaagtcgaccacagacagaaacagacgcacagcagtgccacggagatgtaggtgcggcgttcacggaggtagaggtgaacatgtggtttcacatggctttttgaattttttcgcaagaaggaaagtacgagaacttcctgctatgcacgaatcgctcatcctttcttgccgaagaacgaaacggtgtcttgtttgttcacatagggaaggtcgaaatggtcatcaatgtgcctgacagcatgaaccaccgagcggccacaaacggctacctgatgcgtcgcactgcgaccgactgcggaggtgcgttttgcctcagtgggcgcaacagacgaaccaaagaaacgaaagaaaagacagaaaaaaatggtggaactcgtgctctagcaaaacggactacccgacggaactgcaaagcgtctgtctggtccgagggcgtcttgccgttcccgactgggcgttcgaaaaaagcaagtcttctccatttcatgttttggcggcccgcgcaagcaacagtaatcttcactggcttggcccaccgactctcacgacctcagttcagtatgcgggcgcggggaatcaagtgcgaaatactcgttttctacataattatatatatatatatatatgtatatacgcgtacatagatataaatacggacatgtagacagatgtatgcatatgcatatatagttacaaacgtgtatagatttagacagattcgtaatattttgtgtatgtttcgatcaatacattaacgtttcgcttgcaatcagatgcgtcgatggcctcaacagtcgacagagcatggggtacgctgttttctggggtcgggaacgtttcagaaatctcgtcagagagagcgggcttctccgcgccattggcgtttgcgtgtctgcaatatgttgatcggcgtttacgtcgttttcttgtttttctcttcgcagttcccctcctgacaaacgtcaaagtggcaagcatgttcgtcgaggccctcaacaagaaagaagcgaaagaagctcagggtcgctccttctgggacattcgcagctgggatgaatactggcctcaaaaataa

SEQ ID NO: 4615 - protein, 1699 aa, Toxoplasma gondii
MGVHHALDDAGEMPHSGGRRAVAPIYPLDLAGRLRPAMLVLADGTEFLGYSFGYPGSVGGEVVFNTGMVGYPESLTDPSYEGQILVLTYPLIGNYGVPSSEKDEHGLPKYFEGDRIYVRALVVADYDNAAVTAHFRAENSLSAWMNTHKVPAIAGVDTRALTKHLREVGCMLGKIVVLSEEEERRSGLSLSALAALPSATAAEQRGENDATVTPDKAEARLRVERRQAALTMWEEAIRNKAKNLPWEDPNKDNLVALVSRKEVRVYKSTVVDPNLRDVLILCVDCGMKYNIYRQLLHSKFEHCNIILKVVPWDFDFGNDEFDGLFISNGPGDPERCEKTVANIRRVMERKIPIFGICLGNQLLALAAGARTYKMKYGNRGMNQPVIDLRTSRCYITPQNHGFAVDESTLPRDFLPLFVNANDRSNEGIIHRTLPFFSAQFHPEASGGPTDTFYLFGDFIASIMKAQTLKQVHTTPFSFPQKFQKVLLLGSGGLSIGQAGEFDYSGSQAIKALKEQNIFVVVVNPNIATVQTSQHMADRVYFLPVTDEFVTKVIEKEMPDGILCTFGGQTALNCAVKLHEQGVLAKFGCKILGSPIEAIIATEDRKVFAAKLEEIGEKVAESAAATNTEEAVQAAKAIGYPVLIRAAFALGGLGSGFAEDEETVRRICKEAFSHSSQVFVDKSLKGWKEVEYEVVRDCKNNCITVCNMENLDPLGIHTGDSIVVAPSQTLSNEDYYRLRDTALKVIRHFGIVGECNIQYALDPNSEKYYIVEVNARLSRSSALASKATGYPLAYIAAKLALGSTLVELSNSVTKETTACFEPSLDYVVTKVPRWDLRKFESCDPLMGSAMKSVGEVMAIGRTFEESLQKALRMVDEKAGGFDESVCHFFSTDEDCAPSLPGSDFKTSSSGECMRGGCGRTDSGAERQAALLEAELRRPSPNRIWALALAFQLGWTVDALHEKTKIDKWFLSKLQNINDIKRQLTQLTLDDLTRADFFYIKKYGFSDRQIAQYLMNSPSAAALSQFDVRRRRLHLGVRPSVKQIDTLAAEFPAHTNYLYLTYQGIDDDVSPLAATSSVSAVFAGARAEKREEENAETCRDDEDESLLRRLSKSSSARLRTGEGDAPGKQCFVVLGCGCYRIGSSVEFDWSAVSCVRTLRSLGHHAIVVNCNPETVSTDYDVSDRLYFEDLSLETVLNIWDIEAPAGVIISVGGQTPNTLCSALEKQGVRIVGTSVAAIDCCEDRHKFSRLCDELNIDQPRWKEFTDLRTAKAFCQEVGYPVLVRPSYVLSGAAMRVVTDDEQLDAFLKIAAVVSGESPVVISKFVENAKEVEFDSVACRGEIVNFAISEHVENAGTHSGDATLILPGQKLYVETIRRVKKISQKLARALQVSGPFNIQFICKQNDVKVIECNLRASRTFPFISKAFNVNLIDLATKVMIGAPVTPLPIHLMDLSFVCVKVPVFSFARLRGCDPVLGVEMRSTGEVACFGASKHEAFLKALISAGVPLPLEKRTILISAGPLWSKMELEPYFKILLDLGFTIYATEGTYRFLMNSVVRGQGTHLPGNASPASDSGLRTPTTAESDADACICAKYASRIIRVRKPIVGSNESHNGGHQSPHALSLIESGKVEMVINVPDSMNHRAATNGYLMRRTATDCGVPLLTNVKVASMFVEALNKKEAKEAQGRSFWDIRSWDEYWPQK

SEQ ID NO: 4616 - DNA, 6569 bp, Toxoplasma gondii
  source 1..6569: mol_type = genomic DNA
ctgttttcgtctccagagctgtttcaaatcaaagacgtccgcaggtcccgtcggttgtccctcggaagtacccctccccgtgcatgcgttttgcgcgcatcgacgagcccgcagcacagagtcatgcggtctgcggcgaagacctttggggaaaccgtcgctcagcgctaatcggtttgtccgttgatctgtcagagaaaactcccacctttttctccttttttgtttctgcttcacggcaccccccacactcgtcgatggttgcgtctgtgtctccgtctttgagcaagccgtgatttgctggccctcccccgcgccggttctcgcttcgcatttcttctctgcagcgcttcggccctgaaaccttcgtcgttccccacttcgagtgtcgtttacagttcctctttccgcctctcattcggcgaaccacgccccaactgctttcccccatatcggcggcgcctgtgcgacctccggtctccacgcccgcgcgacttctccgcctgctgtccgctcccgtgctgtccttctgcaccggatcttcctctggctgaaccttctgcccgtcttgtctctcgaattctcctctaccctcttcttgtcttcctgtctgcatcgtcgtgtctctcttgcgtggggcagcgggtgctgttgagtccggcgctacgtggctaagttcgcggacgccgcagagaaataccttggagcgttttttgacggcgaaggataatgggggtccaccatgcgctcgacgatgcgggggagatgcctcacagtggagggcggagagctgttgctcccatttaccctctcgatctggcaggacgtctgagacctgcaatgctggtgttagccgatgggactgagtttctcggatactccttcggctacccaggcagtgtgggaggcgaggtcgttttcaacactggtatggtcggctaccccgagtctctgacggatccttcgtacgaggggcagatcctcgttctcacataccctctcatcggcaactatggcgttccctcttcggaaaaagatgagcatggcctgccgaaatactttgagggcgaccgcatttacgttcgcgctctcgttgtggcggactacgacaacgcagctgtgacggcacactttcgtgcagagaacagcctcagtgcttggatgaacactcacaaagtcccggcaattgcaggagtcgacacgcgagcgttgaccaagcacctgcgcgaggtcggctgcatgctgggcaagatcgtcgtcctgagcgaagaagaagagcgtcgatccggcttgtcgctctcggctctcgccgcgcttccctcagcgactgcagcagagcaacgaggagagaacgacgcgacggtgacgcccgacaaagcagaggcccgcctaagagtggagaggcgacaagcagcgctcacgatgtgggaggaggcgatccgcaacaaggcgaagaacctgccatgggaagaccccaacaaagacaacctcgtcgccctcgtttcgcgaaaagaagtgcgcgtctacaaatctactgtcgtggatccgaatctccgcgacgtcctcatcctctgcgtggactgcgggatgaaatacaacatctaccgccagcttctccatagcaaattcgagcactgcaacatcattctcaaggtggtgccgtgggatttcgactttggcaacgacgaatttgacgggctcttcatcagcaacggtccaggcgaccctgagagatgcgaaaaaacagttgctaacattcgacgcgtcatggagcgaaagatccccatcttcggcatctgcctaggaaaccaactccttgccctggctgccggcgcgagaacgtacaaaatgaaatacggaaacagaggaatgaatcagccggtgatcgacttgcggacgtcgagatgctacatcacaccccagaaccatggctttgccgtcgacgagagcacgctgcctcgagatttcctgccgctctttgtaaatgcaaacgaccgttcgaacgaaggcatcatccatcgcacgctgccttttttctctgcacagttccacccagaggcgtcaggtggtccgacagacacgttttacttatttggcgacttcatcgcctcgattatgaaggcgcagacgctgaagcaggtccacacgactccgttctcctttccgcagaagttccagaaagttctgcttctcgggagcggaggcctgagcatcggccaagccggggagttcgactacagcggctctcaggcgataaaggcgctgaaagagcagaacatctttgtcgtcgtggtgaaccctaacatcgccacggtgcagaccagccagcacatggccgaccgggtgtacttcctgcccgtcacggatgagttcgtgacaaaagtcatcgaaaaggaaatgcccgacggcattctctgcacattcggaggccagacggccctcaactgcgctgtgaaactccacgaacaaggcgtcctggcaaaattcggctgcaaaatcctcggcagtccaatcgaagcgatcattgcgactgaggatcgaaaggtgtttgcggcgaagctggaagaaatcggagaaaaagtggcggagagcgcggccgcgacaaacacggaagaagctgtgcaagcggcgaaggccattggctaccccgtcctcattcgcgccgccttcgcactcggtgggctcggatctgggttcgccgaggacgaggagaccgtccgacgcatttgcaaggaagccttctcccattcttctcaggttttcgtggacaaaagcctgaagggctggaaggaggtggagtacgaagtcgttcgcgactgcaagaacaactgcatcaccgtctgcaacatggagaacttggatcccctcggcatccacacgggagattcgattgtcgttgctccttcgcagacgctgtctaacgaggactactaccgcctgagagataccgcgctgaaggtgattcgtcacttcggcatcgtcggcgaatgcaacatccaatacgcgctcgaccctaactcggagaaatactacatcgtcgaagtcaacgcgcgtctctctcggagcagcgccctcgcgtccaaagccactggctaccctttggcctacattgcggcgaagctcgctctcggctcgactttggtggagctcagtaactccgtgacaaaggagacaaccgcctgcttcgagccttcgctggattacgtcgtcaccaaggtgccgaggtgggatctgcgaaaattcgagtcgtgcgaccccctgatgggcagcgcgatgaagagtgtcggcgaggtcatggccattggacgcaccttcgaggagtctctgcaaaaggcgctcagaatggtggacgagaaggccggcggcttcgacgagtcggtctgtcactttttttccacggacgaggactgcgcgccttcgctgcccgggtcagacttcaagacgtcctcctccggagaatgcatgcgtggcggctgcggacgcacggactccggcgccgagcggcaggctgcgctgctggaggcggaacttcgccgtccgtcgccgaatcgaatctgggcgctggcgctcgccttccagctcgggtggacggtcgacgcgctccacgagaaaacgaaaatcgacaaatggtttttgagcaaacttcaaaacatcaacgacatcaagcgacagctcacccagctcaccctcgatgacctcacgcgcgcagatttcttctacatcaagaaatacggattcagcgaccgtcagattgcgcagtacttgatgaattcaccgagcgcggctgcgctgtcgcagttcgacgtgcgtcgtcggcgactgcacctgggcgtcagaccgtcggtgaagcaaatcgacactctcgcggccgagtttcctgctcacacgaattacctttacttgacctaccaaggaatcgacgacgacgtctcgcctctcgctgccacatcgtccgtctcggcggtcttcgctggcgcgcgagccgagaagagagaagaagaaaacgcagagacatgcagagacgacgaggacgaaagtctcctccgccgcctgagcaaaagctccagcgcgcggcttagaaccggcgaaggcgacgcacccggaaaacaatgttttgtggttctaggctgcggctgctaccgcataggatccagcgtcgagttcgattggtccgctgtttcgtgtgtccgtacacttcggtctcttggccaccacgcgattgtggtaaactgcaatcccgagactgtgtcgacggactacgacgtgagcgatcggctgtatttcgaagacttgagcttggaaacagtcttgaacatctgggacattgaagccccggcgggagtgattatttccgtgggcggccagacaccaaacacgctgtgctctgcactggagaagcagggcgtgaggatcgtcgggacgagtgtggcggcgatcgactgctgcgaggacagacacaagttctcccggctctgcgacgagctgaacatcgaccagccgaggtggaaggagttcaccgaccttcgcacagcgaaggccttctgccaagaggtcggctacccagtcctcgtgcgtccttcctacgttttgagtggtgctgccatgcgagtggtgaccgacgacgagcagctcgacgccttcctcaaaatcgcagctgtcgtcagtggcgaatctcccgtggtcatctccaagttcgtcgagaacgccaaggaagtggaatttgacagcgtcgcttgccggggggaaatcgtaaactttgcaataagcgagcatgtggagaacgcgggtactcactctggagacgcgactttgattctccctggacagaagctttacgtggaaacgattcgtcgcgtgaagaagatctcgcagaaactcgcgcgcgcactccaagtctcaggtccgttcaacatccagttcatctgcaaacagaacgacgtgaaagtcattgagtgcaacttgcgagcgtcgcgtactttccccttcatcagcaaggccttcaatgtaaacctcatcgacctcgcgacaaaggtgatgattggcgcaccggtcactccgttgccgattcacttgatggacctttccttcgtctgcgtgaaagttccagttttctctttcgcgcgtcttcgcggctgcgacccggtccttggcgtggaaatgcggtcgactggagaagttgcgtgcttcggagccagcaaacatgaggctttcctcaaggctctcatctcggctggtgtgccgctgcctcttgagaagcgaacgattctcatcagcgcaggccctctgtggtcgaagatggaactcgagccgtacttcaaaatccttttggacctgggcttcacaatctacgcaacggaaggtacctacagattcctcatgaacagcgtcgttcgcgggcaggggacccacctgcctgggaacgcgtcgccggcgtccgacagcggccttcggactcctacgacagccgagtccgacgcagatgcgtgcatttgcgctaaatacgcatcgcgcattattcgcgtgagaaagccgattgtcggatcgaatgagtcgcacaacggaggtcaccagtcacctcacgctctctccctcattgaaagtgggaaggtcgaaatggtcatcaatgtgcctgacagcatgaaccaccgagcggccacaaacggctacctgatgcgtcgcactgcgaccgactgcggagttcccctcctgacaaacgtcaaagtggcaagcatgttcgtcgaggccctcaacaagaaagaagcgaaagaagctcagggtcgctccttctgggacattcgcagctgggatgaatactggcctcaaaaataatttccaatgctttcgccaaaaacgttccatatctctcgctctactgacgcatttgagttacgcgacggatttccagcagtggctccgctgtatgcttcttcctctctctctaggcataatgatatatatatatatatatatatatatatatgcatatgtatgtgtacgtgtgtgggaacaccggcttgagaaccggttttcaagacgttgaaagtcgtctcatctttgttcctccacaactgagcatttgtctgtgtagatgcgcggctttgttcacatgtgtatcgacatctcagctgttacgtgtgctgatgtgaatagagcagcgagcgtacaagtagtgaatttgcctcagggtcttttggcgacggttggtgttgtcgaagcaacgcgcttgcagttgtgtgcatgcttgagccgatttgaaccaacaacctatttgtgcggtgccagtgttctgcaaagagagcgtcacgtcgggaatgcttcaaagccgaaacaaatggcatcgaaactctcgtcggatgcgagacatgcctgcacctcctgccgtcgcattccatttcgaaggaaagtcatcgcctcggacgccgagttctgattcacggaaaatatgcagactgtggcgtaaccattctctcagaagaaacacagatttctacaactcgaacttcgccttcttccataaacgtttcgtcaacatatttatacatacatagagatatacgtgtataagtaaa

SEQ ID NO: 4617 - DNA, 25556 bp, Toxoplasma gondii
  source 1..25556: mol_type = genomic DNA
ctgttttcgtctccagagctgtttcaaatcaaagacgtccgcaggtcccgtcggttgtccctcggaagtacccctccccgtgcatgcgttttgcgcgcatcgacgagcccgcagcacagagtcatgcggtctgcggcgaagacctttggggaaaccgtcgctcagcgctaatcggtttgtccgttgatctgtcagagaaaactcccacctttttctccttttttgtttctgcttcacggcaccccccacactcgtcgatggttgcgtctgtgtctccgtctttgagcaagccgtgatttgctggccctcccccgcgccggttctcgcttcgcatttcttctctgcagcgcttcggccctgaaaccttcgtcgttccccacttcgagtgtcgtttacagttcctctttccgcctctcattcggcgaaccacgccccaactgctttcccccatatcggcggcgcctgtgcgacctccggtctccacgcccgcgcgacttctccgcctgctgtccgctcccgtgctgtccttctgcaccggatcttcctctggctgaaccttctgcccgtcttgtctctcgaattctcctctaccctcttcttgtcttcctgtctgcatcgtcgtgtctctcttgcgtggggcagcgggtgctgttgagtccggcgctacgtggctaagttcgcggacgccgcagagaaataccttggagcgttttttgacggcgaaggataatgggggtccaccatgcgctcgacgatgcgggggagatgcctcacagtggagggcggagagctgttgctcccatttaccctctcgatctggcaggtcagtccgcagtttcgttcagacttccttctcgtctgggttctctgtttcacacgcctggccgcgtctcctctccgcttcttggtgtgcagcctcggtttctcccctttgatcagctgtctcggttgcgcttccgccccttgcgtcgccttccgtgtttgcttccaattttctcctggcttgctcgtgtgttcgcgcccctccggggagaccggcctgtctgctgccgacagagaggcagccgtgaagggcgtgatcatcaactgtctcgacggagagacacgacgtctgtgatgcaagcaaatgagcgcgtgtatgcacaggtacccgcgcatactcaaatattttcgtatctgcagatccacaggcgcatgcatgcgcccaactgtacccacgcgtgtttctacatagttgtggagaggcacatgcgtctgcatgtgtgcacgctgtctattcttgcgaacgataaacctggtggcgatccgtgtgttattttcaagaagtgatttcgacgcaggccatctcgctcgtcgctcgtttcctgtgtttgtcggctgctcgcaggacgtctgagacctgcaatgctggtgttagccgatgggactgagtttctcggatactccttcggctacccaggcagtgtgggaggcgaggtcgttttcaacactggtacgtttttctcgaatttgtccagaaacgctgacgtttggcgtctctcctctccagaaagggtgcattcggtctatccgctgtgtgctgcagcgattggtcttcctcttacaagcgcgtacaccaccctatgcagcctcatgcaccgccatctgtcaacgcgtgtgggccgccaccacacgaccatgtatctaccttcgataaacatatttatgcatatatatatatatatatatatacatatgcatgtagatactcaaaatgcatgcatattggtacgtctgttcacctgtatttttctgcgtgataattagatacccctgggttgcgtcaccatgagctgtgtatcgttctgggtgcatgcgttgttgcgggagtgttcgtgcgtcgggaaaggtagtggccgacttcttgtctttggcgtggttaggtatggtcggctaccccgagtctctgacggatccttcgtacgaggggcagatcctcgttctcacataccctctcatcggcaactatggcgttccctcttcggaaaaagtgagagcagacagcaagaaaacgaagagactagcagaaccccgtacttcgtggctgatccacatcagtgagagtcgaggagggagagtcggacttctcttgcgacgcaacgtcacaggaaagcaagtctggcaggggtctccgctttctcacatgccgaatgcgcacacaaatcattcatacatcactacaaaactgagtcctacgtgagaagagcaacgtcacctctccgtgagacatatacgtgtttctatatacatatatacatattatgtatatatttatattcaaatatatatatatatatatatcaatgtggatatctaagtttatatatgaacgtacatctgtctttcgggagagtatttccctaaatggcagatgctaagacgcttgtacacctgcgtgcaaaggtgtttacgcgggtgtctacacgtgagcgaagtgattgctacacacatgtatatatatatatatatatatatgtatgtatgtcgctttacaatgtttgtttttctgtacatctaaagtcgtctaggcatcgatatgtgatgtgcatttcagcgtatttcgtgtgtttcatttccgctcttcaggatgagcatggcctgccgaaatactttgagggcgaccgcatttacgttcgcgctctcgttgtggcggactacgacaacgcagctgtgacggcacactttcgtgcagagaacagcctcagtgcttggatgaacactcacaaagtcccggcaattgcaggtgcgaaaacatcgaggccgaagtgtctgtagtgtcagatgcgcctctggacaagacatcctctttcgatgcttgtctttgattttcacttaattttctcttcgcaagtctgcgaaggaacgtctgtctgtacatctcgatgcccaggtggctttctcggccatttggaggaactgtcttggatccgcgtagtaggcatgtatgagggagcagcttctctttcttctgaattgtgttccacttgtaagtcggttcgaccacgagcagtcaagacgctcttaccgtgccaccgagtcaacgtcgcccatcacagaccggcttttgaatgcctttttcttcaggctccattaatgcacgtctcactgaatccgtgctcgtcaatttggacagctagatctgtgtagtccctagagactaacttttggagggagactaacaatacagctaggttgctctacctcggctatgtttaacgcatagttcacggatcactgttgccactggtccttacagagagagcacacgactgctcacgtgtttgtcatggagacacatctcgattgtgtatgtttcacttcaattctgcagagccgttcagtgtatgtctgccatgacggggaggggtatctcaagggtgtattgtgaactgtatttccacggtgtacggggcttgaagtactggcgcacatatgtctggaggacgagacgtggtttagttcgtgtctcagtgctcaacagcgtccggatctctggcatgctgttgccatcctgttagttgctggccttcgcggctactcgttctcctttaggtgcacctccagtgtctccagttctgctggtgttcccttgccgactgttgctgctctgtcagggctttctaggtccccgcctcactctcgtttccgcttctctgttttctgcgtccgtgtgtgtctcacctcttcctcttcgtttccatctcttttcttgtctcacctttccacggctctcgtttgctcttgaaacgctgtcggttgtcgtcgttccgcctcgttctctattccgctctatcttcgtcgttcctcttttgcttctttccgacttcccgactcctgcctgtttccggctgtatcgttttctttttcaaggagtcgacacgcgagcgttgaccaagcacctgcgcgaggtcggctgcatgctgggcaagatcgtcgtcctgagcgaagaagaagagcgtcgatccggcttgtcgctctcggctctcgccgcgcttccctcagcgactgcagcagagcaacgaggagagaacgacgcgacggtgacgcccgacaaagcagaggcccgcctaagagtggagaggcgacaagcagcgctcacgatgtgggaggaggcgatccgcaacaaggcgaagaacctgccatgggaagaccccaacaaagacaacctcgtcgccctcgtttcgcgaaaagaagtgcgcgtctacaaatctactgtcgtggatccggtgagtgacagagcccagggaaagacgtttcacgtgcgaaagcgaaacgcagtttccacagtccatgtttagatttagcgtgggacatgcacaagttgggattctgcggaatgccgctatctggggaggggagtatagacgccgagttcaactcctggcttcaatctccactcaaccgaggcgtagcgcaatgcgctcgcttgcactggtttcgccgcgccggaggtccgtgctgagctgtacgtacatccggggtgtgtatgcacgttgcgatcgcgtttgagtcttttgagggtctgactgtgcgtgtccggggcctcccgggcggcgcctgtcgaatgtgcggctcggctttgcccgccttctttctccaaagtgtgtctggactgcctttctgtgttctgtcggaatctcaagtctgggctgtcggtttcgttgcctgaatctgcagaatctccgcgacgtcctcatcctctgcgtggactgcgggatgaaatacaacatctaccgccagcttctccatagcaaattcgagcactgcaacatcattctcaaggtagagctgtcgctgctctgactgcattgactttgaaactctcattcctgatctgttagctctcccggcagttcgcttgtattttctgtttcctgtggcgcccacccgtcaattcccctttctgcggcgccgagcgctcttcagctggtactgggaaatggagatgtgtgtccagcagtatcaagacatacataagtatactgatgtgtacacgtgaatctccattctgtttatgcatgcatatctgtctatatatatatatatatatatatatatttgtacatggatttatgtgtgtgcttgcgtttgaatatatgtacgtattatctacaagtctgcatgtttccgtacgaatgtctgcacgcgtgtgtgtctggttacatgccgctgaatctcactattcaattaaacagttgagtgtggagaggtacgcgagactgtgactgcgcagctgtgaaaccgttcaggagcgcatgcgctttgcgtgtctctcaggtggtgccgtgggatttcgactttggcaacgacgaatttgacgggctcttcatcagcaacggtccaggcgaccctgagagatgcgaaaaaacagttgctaacattcggtgtgtgctgcagagaaaagccgattcgttcgccagagtcaggaacagcacagtggcgcatttccatttccgtcttcgctgtagacatgcaaaaccatcgcgatgtgcagattggttgagcttgctctctgagtcgcgggaaactgttgcttccgttccttggcgacccaggcacagagaagcgtgcatgcaaaaaacaacttggagtctctccgttttgtctctgctaacttagtagaacttagacccggcaaacagcgacatgcacgagttaaacgcgtagttgctccggttcgggccaaggtgaccggaatgcccggtggctgccgggtactatgcgcttccccgcggatctcccatgttctcttgtgtgggaagactgcgcagcactgctggtggctgcgtaggttcatgcccttacaatgcaaatcccttttataccgttcgttctccctcccgttttcagacgcgtcatggagcgaaagatccccatcttcggcatctgcctaggaaaccaactccttgccctggctgccggcgcgagaacgtacaaaatgaaatacggaaacagaggtaagcgttgccgttcgtcgggcacactgattgtactccgtttcgggtgtacgtacacctctttcaccggcagcgaggcgccggtccagggagcgtcccgcgacgtgggtggcaggccagtgactagcgacggcgaggtgaagagggaaaatagcatctccggactctcatttccgttttgccgttgcaggaatgaatcagccggtgatcgacttgcggacgtcgagatgctacatcacaccccagaaccatggctttgccgtcgacgagagtaagcagcgacaaaattccacctgcgaaatctaggtgccatgacctccatatgccgttatcgtagacataatgttgatatgtagatgcatatggatacgtcgagagaggtacagattcactttcttagatgtagacggctataaatcaaagtggttcatgtatctgcaattggttgtatttcgacagcattgtgaaagggagcggtgttcggtagagcgcaaatgtgacgcaagtgtatccgtaagaccctgagtttcattataagtaggtattgtctctgtacaaatgatccgcgagccagagctgtataactcaaatcgaataaacagagtgtctgtcgctgtgtatacgaatggtaacagtaatccatatttcacgcctagaacataaccgatgtggaataacctaaaaatgtgtgtttgagccgtccacatcagcgatatgtcgattttgaatcagcgaagtcgacgtttgtccccgttgatgaagttcaacaatgagccagatattcactttctagaacctccacaaaggatgatgtcctccaggtagcgaagataccaactgtggtgttggagaatggcgtttcaaagccggtagcgttgcagacactcttgtgtcctcgtgggagtccgtgttcgaggcgggcagttgctacagcaagtagatgcatagaacgaagcgagacctccacgcggggatataccttttgacatcagttctggacgactgcagatcctttgcacagatgcaatatctgcgtacggtgtggcgcttacaatacatggtcgagctatactcctgtcggtctcagtgcggccttcgtcagatgacagatgtggacacctgcctatacgaccctgtgttgaacctctcgccgtttctgcaggcacgctgcctcgagatttcctgccgctctttgtaaatgcaaacgaccgttcgaacgaaggcatcatccatcgcacgctgccttttttctctgcacagttccacccagaggcgtcaggtaaggcggcaatacttcttcgactgaaataccgacgttgcagatcagcgacatctatttccgttggcgtcgtttcaatgatcagtgcttgaaggcatcttggcagcgtttcgtcggatcaatacggcggaactggagctcgacggtacaaggaataagtgactgccgatgctcttcccgatgaggcaggggcgacagttcctttcatgagggaaacatgtgcttgtgtcatcagttcagttcctcataactggaggcatctgttgggtcttaaataaagccgtcactctcgctaagaaggatgctgccttgcgacgcaactcgtgtgtcaccaactgcatcgcggtgggagagtttttcctctgagacaagacgaggatggacctccgaagttcgtgtacgcagtctgcgagtcagtggggtgccgacgcacgagacgaagacgagccactcagagatgattgtttctcacttttctgcctcggcgaagaagcagcgcatacccatcggtgcccctccgctgggcgtctcgtgcgttccctgtcgctggcgcggcttcgtcaacacagtgcaccgattttttcttctgctcgtttgtgacaacctagagagctccagtgagatcgaggagtggcgcgagatgtgagtttcacgcggtggaggccagatgatgtttcgtcaagagctgcgccgcagtctaccacgcagcgcagaccccgtggggtgtgtccttcgcgcgattctttcctggagtctgtggggtgtttatacactcggcgtccctctgtctgtgccttctggctcaggtggtccgacagacacgttttacttatttggcgacttcatcgcctcgattatgaaggcgcagacgctgaagcaggtccacacgactccgttctcctttccgcagaagttccagaaagttctgcttctcggtaaggcgatgttcctcccgcatcttgagggaaggcgagttcttttaacgtgcagaaagccctttgcgggggtcaccagagaaggaacgccatcggctgcatccttcttggtttctcgcagatgcgtctgtggctggccgtcgcgtggcaccttctgaacgcccgtgtggaggtttcccgacgctgtcatctctgtcaaggtgtcgtcgtggacgttcaagagtgcgagcgcggccctgccgactgtcgcagagagcgcggctcatgtcatgtctcccttgtgcattctccctgagcttttcgcgggctctctttcgacctctgtctccgccgggatcatctgtttaggaggaccgtgtcgtggtgactgtgccggaggctctgctcgctcaagtgaggaggtcggggtaaggcgggaagtcggctgtgtgtgcgtggtttatttgcttcgtagggagcggaggcctgagcatcggccaagccggggagttcgactacagcggctctcaggcgataaaggcgctgaaagagcagaacatctttgtcgtcgtggtgaaccctaacatcgccacggtgcagaccagccagcacatggccgaccgggtgcgttgaccgcgcagacggattgcgcagagtggcgtcgagggagcgcgaacgaaaaaggaggacgcagacgccagagaagacacagagaatcagagagacagcgagagacagacagcgagacagaagatcaatcgggaggcaaggaggagagcgaggtagagagaaaccgcgagaaacacagagaggagcagagagctaacaagacagaaacaaagcgtggtgcaggaagacgcagatgagagggagagacggagcccagagcagagacagaaagacagagcaacgagagacacagacagaacggagagagagagataagggtggaggtgaaggaataaaggcggggcttgagcaaacggtgaagcattaggctgtggaaggtgacgaaagcgcgatggaggcaggatggtctttgtgaggccttctttgtcggaagaagagagtggacaccacgtatttccactgctgcgttgcgtaacgcgtttatgagagggttctgcggttccccagagactggcggaaaccaaggagtcggcaggcttcctcgggtctctctctcctctgcgttgtgagcttcctaacgtctgtcgacttcgggaagtccgaaactctccggagaagacacacgcaactccaaactgcgagtggagttgaaccgatccagtcgagtagtagcttgcatgaaatgtgtcgagccgggtgcatgcaattcattttttcaggtgtacttcctgcccgtcacggatgagttcgtgacaaaagtcatcgaaaaggaaatgcccgacggcattctctgcacattcggaggccaggtgcgtttgcgtgtgtgcaacggctttttcctcgatgaacgtaactaaatgcgcgaagatataacgaggcctaggcactcgcaaatggacaatccatccatatgcatatatattcatatatatgcatgtttaatatatatatatatatatatatatataatatgcgtatggggctggccattgaggagatatgtatgcagctgttcagaggagtagcgtaggcgaacacgtttgcatgcatagacttctggacgaagcacgtgatcgtgcggatatatgtaaatgaggttgtgggcgtatgtggggacagcgatatctggacagggtacggcttttttttcactttatggcatgttcagacggccctcaactgcgctgtgaaactccacgaacaaggcgtcctggcaaaattcggctgcaaaatcctcggcagtccaatcgaagtaagaatgtattcatatatatacatccatatatatatatatatagatagatagatattcgtaactgcataaatgcacatattcatagtgatacatatatatatgcacatagacatatgcaagtacatccgcgcacacatatgtccatatatgtgtgtatatccatatataaatatatatccatatatatatatatatatatatatatgcgtgtagagaaatgtgtgtgtatcagtgcaagttacgatgcacaaatttgtatactggtgtgtatttaggtatccgcgcatttcgagtttcgtgggaagcacgcggtttcttgtttgtcttttttaggcgatcattgcgactgaggatcgaaaggtgtttgcggcgaagctggaagaaatcggagaaaaagtggcggagagcgcggccgcgacaaacacggaagaagctgtgcaagcggcgaaggccattggctaccccgtcctcattcgcgccgccttcgcactcggtcagccaaagaagagaccggggagtgaagacgagcgaagaaaaggaggcgcaaggtcaacgagagcaatgagaggagacccagaaaaggcgcacacagaacggatgcagacggaaacagacgaggcggcaaaagaggcagtcgatgacagagaagaatgcgaggaaggacgcgagggagacggaagcaccgaagacgaagggaagagaactggccagaaacgaaggatacggatttcacgttcaagtgatgtcaacttgtatgtggactatcgcaggtgggctcggatctgggttcgccgaggacgaggagaccgtccgacgcatttgcaaggaagccttctcccattcttctcaggtccggtcaacttctcgtagtgcatgcgtatacgcacatcagagtaaaatttgcatatatatatatatatatataagtatatgtatgcacacatatatgtttcagttcttatctgcgggtgtacttgtgcatgtccgcaccggcgtcgtgtgggcagatgtgaacgtctggagagagaggtcgcccgttctgaatgcgcgtgcatgcgtttctgacaggcgtgtctgcatggctgcggaagccgaatgaaaccccacacttccgaaggaatctcgcgtttcagccggttcgtttgcaggccgagtgtcgtcggggaggcttcctcgttgtgttggtgtgtgccggtccagtggttctcgcgcgaagccccgagtgcgtcccctataagactgaaaagcgccaagtcgagctggcggaactctgagaatttacgttttttcaggttttcgtggacaaaagcctgaagggctggaaggaggtggagtacgaagtcgttcgcgactgcaagaacaactgcatcaccgtctgcaacatggagaacttggatcccctcggtgcgtctcgtctgtgtgcatttgccgtgtttgctcttcaactgtggcttctcagctctgtcgaggggtgcgctgcggaggctcgctgtacaccacgaattgtttctggcctctctgttaacgagcgttctgaaacgaatccccacacaagtgcatgctccctctcgtcctctcgctgcttgactctgtcgctgcgggggaatccctcgtaccgtgctctcgctgtgacgacctctgagtggacgcgtctctctcggacttctctttgtctctcgccagacgcagtgattccaagtctctctctttttgtgcagcgctgtctctgacgaacgctgtctatcggcgtatctctccttctccgcttctccagagcttggcacttctctgtataaagatttacatatatatatatatatatatatatatatatatttgaatgtttttgtatatgcactccatctggataattcagtcgtcgaactctattgtcacagcgttttggtcacttaaaacggcgtccttcgtcgatggtttgcgcatgcgctttttgcgtccatgtctgtacacccgcgtgtggattttttcccctcaggcatccacacgggagattcgattgtcgttgctccttcgcaggtgagctgtcttcgcttgtgtttttctgtttttcatctctctttatacatttctcggtccgatatttctgctctctcatggcctctcttttgccattttcctcgttgttttctcttatccctcgttcttcctcttgttatgtcttcttcttatcctttgttatcttttgtccgcgttggtctattgttgtctccgcttcaaatcccttcgtctcccacacaagcgcgcgttttcttctttgctctctctcttcagacgctgtctaacgaggactactaccgcctgagagataccgcgctgaaggtgattcgtcacttcggcatcgtcggcgaatgcaacatccaatacgcgctcgaccctaactcggagaaatactacatcgtcgaagtaggtgacaagagagtgcaaacgaaaaaccacgggaggcgaagggaacgcggtcttacagaggatgatgccgcgaggaaaggcggacgaacaccctgaaacaggagagaggaaagcgagaaccggacaggctcacaccaaagtcagacagaggccacagagcgagaaggacagggaggtgcagaagcggagagaccggccagaaaagagagagacaggggcggagataagtgctacagaaaatcgagagaagctttctcgatcctagctcaggttcgatgtcacctgcctcgcgctgtgcggcatggccacacgcatgctgaaagtcaacgagaaggtcgccaagcagttctacaaatcaagcactgtccagacagctgctgacggacattccgtttttccttttgtgggcgtttgtgtggctgtctccgacgttcggacgtcccgcgattacagcgtctctgactttccagacgcctcgctttctcatctcttctcccgcttcgctgtcttgtgggccttttcctcaccgcaggtcaacgcgcgtctctctcggagcagcgccctcgcgtccaaagccactggctaccctttggcctacattgcggcgaagctcgctctcggtaacgtttgtctcccttctttttcgtcgaaacttctgagtggcttttccgaactgttcgtcccagagtcgatccgcatggcccgctcaaagcccagcatcccctttcattgctgctctccttgatgcttcaaacgtgtctgcacggccttccttctgttcttaaattcgcggcggtgatgtgcgtttccgtctaatcttctttgtctcgtcggctgagtgaggtggtgcttcggtcggttttcatcctcgagaactggcagtgtgtgtcgcatgttttctctctccatgtaggctcgactttggtggagctcagtaactccgtgacaaaggagacaaccgcctgcttcgagccttcgctggattacgtcgtcaccaaggtgccgaggtgcgaggacacaacgcacacagatagaagttccatagggactcccaggacaccagtggtttcttccctcttctcttcgtggcctgactgctccctcgttctctctttcctgcctctcttcatctctttctctgtttctctcttcgttgttcctgtccttcgccgtctcttccgctgttcgctgttggggtccgttccagttcggccgtcgcttgcgtgtcaacgtgtgtatggttctctctcctcaacgtcaccacgtcgcctgcgtccttgcccaaaattgtttctgccttctgcaggagctcaacgccttctgttagatgcctctctgacgcatgctttgcatctctgcactcgatagagacttgccgttttgaggaagaagtttccagagcgtctgagagagtgtcctcgctcgtctctcgacgtccagcgaggcttgcgcctcctggcggtgaacagattcgtgttgaatatgtctttctgctctcaggtgggatctgcgaaaattcgagtcgtgcgaccccctgatgggcagcgcgatgaagagtgtcggcgaggtcatggccattggacgcaccttcgaggagtctctgcaaaaggcgctcaggtaaaccacaaagttccaatcatcggcatccgtcgacaaacagttgtcccagttgaagttactgtagccacatctctcttctccgcatttcctctctcttcctcttctccctcttgttctccctcttggtctcccttgtgttctctttcctgttctctgtttgcgacgtttcttcgactgtgtctcgctgacgtccgttctggtggcctgcgttttcgcctctgttcttcagaatggtggacgagaaggccggcggcttcgacgagtcggtctgtcactttttttccacggacgaggactgcgcgccttcgctgcccgggtcagacttcaagacgtcctcctccggagaatgcatgcgtggcggctgcggacgcacggactccggcgccgagcggcaggctgcgctgctggaggcggaacttcgccgtccgtcgccgaatcgaatctgggcgctggcgctcgccttccagctcgggtggacggtcgacgcgctccacgagaaaacgaaaatcgacaaatggtttttgagcaaacttcaaaacatcaacgacatcaagcgacagctcacccagctcaccctcgatgacctcacgcgcgcagatttcttctacatcaagaaatacggtaaacgccttctcgcactgtcgagacactggggcatgtggctcgggtgtcttcggggtggccgtcaaacagtggggcgtttcccagtcgcatttctgactcttttgtacatctccgaaaacacggcgacgatgcgcaagccgaaggggacaagagacaagcgatgctccatgttttcaaagctcctgtctgttccccgtctcttgtggcaatcgtagaagatacgctaaccgcagactggcggtcaaatgttttttttcgttttgggatccactgtggttctcatcttctcgtcgtctcttgtcttcgtctctcgctctcggcttctcgtcttctactcggtctcccctgctccgtctcttctcctcgtccgtgtctcatgttcctcttttcttctcgccttcttcgcttcgtctgtgcaacgaccagactgcgacaatccctccccgttagtaggataggccgcacgtttctctctgtttcccaggattcagcgaccgtcagattgcgcagtacttgatgaattcaccgagcgcggctgcgctgtcgcagttcgacgtgcgtcgtcggcgactgcacctgggcgtcagaccgtcggtgaagcaaatcgacactctcgcggccgagtttcctgctcacacgaattacctttacttgacctaccaaggaatcgacgacgacgtctcgcctctcgctgccacatcgtccgtctcggcggtcttcgctggcgcgcgagccgagaagagagaagaagaaaacgcagagacatgcagagacgacgaggacgaaagtctcctccgccgcctgagcaaaagctccagcgcgcggcttagaaccggcgaaggcgacgcacccggaaaacaatgttttgtggttctaggtaggcgacgaaggcaagaaactttgaggatcgagagacgaagaagcattgaagggagagaaatgcaaagacgggagagagatcgagaaccggaggagaagagagaggaatggcgacagagatcaagggacgagttggagacgatgcatgaagcaaaggcgagcaaaaaaggcgattcacggaagaccagaatcagacgacaagagcatgtctttgtttatcgacgggcacacctcattttcttttctctcaaggacctgtcggtgcttgcgcaccaggtactgcaatatatatatatatatatatatatatacatgaacatccacagatatgcttgggtagatacagaagtacatatatatatatatatacatatacgactattcatgcatatgcatgtgtatatgcttttttgcacctttttgtgcgttggtattttttggtgtgtttcggcaggctgcggctgctaccgcataggatccagcgtcgagttcgattggtccgctgtttcgtgtgtccgtacacttcggtctcttggccaccacgcgattgtggtgagtattcggcgcctctcagtagtagatcacttcgcaaacgtgtcggtccttaggtcaaggaatttgcgacaagcctctgcctcaggttcctcgtgaatagcctcagactatttttaaacaaatgcagcgatgcattaacgcatggggacactgcatgcgagatgagccactgttctgcgaatatctttatggatatgtatcaatggatacatatatatatatatatatatattatgtacgcagtggaggccatgtagaaatgggcatttttacctctattcacgaataagagtaggtctgtgcatgacgacgacggacatgaaagtgatgctagacagtatatgagcatttaaaaggtaattattcataaaagcgtttattgaacgttgttcgtcctgctcttttcaattcgcattccgtggaacaggtaaactgcaatcccgagactgtgtcgacggactacgacgtgagcgatcggctgtatttcgaagacttgagcttggaaacagtcttgaacatctggtaggtttctcacgcgtagctgtccgattgtgggctctccgaatataagccgaatcgcggtgaccagcctggatgtcggccttggacgtgtgtctggcccctcaggttccccgaacattcagagagagctcacatggcccgtaggtttggtgtctctcagtgtgtcatgcagcgcttcaaagttcgttctttgaattcgcacatcccgtcgatgtctgtgggtccgccttggatggcgccgcctcgttggtatttgaattcccaaataaggggcacagaaatcactgttttcgctgtgtggaagacacgttcttttgtgtgtcccagatttctctcgtcttgtctttcttctcacgcttctcttctgtcgtcatctgtgcctcgtgcacgcggctctgaactcgtcgtattctcctctctggctcgtgtctctttccctcctctttgactttcttttccgtctcgcttcgcttcccttgttctcccgtcttgccttcctgattcacgcgttgtctgtcacgtctggctttcgttgatcgcctctattttccggagttttctcctcctccactctcttctttatctcagaaagactttgaagatttaaacaggggtccacctcctattctacactccggagaagaagtaataccttcccgcgcggtggtggattccattcgctatcctgtgtctcctgcctactagtcaagagatgttgcgcgagtgtgtgcttctcgttcgagggtcctctgtcgcgcgtttttcgttcgtttccagggacattgaagccccggcgggagtgattatttccgtgggcggccagacaccaaacacgctgtgctctgcactggagaagcagggcgtgaggatcgtcgggacgagtgtggcggcgatcgactgctgcgaggacagacacaagttctcccggctctgcgacgagctgaacatcgaccagccgaggtggaaggagttcaccgaccttcgcacagcgaaggccttctgccaagaggtaagcggaaacacatggttcattcggggcgaaacaagagaaaacgggagatggagatggggacgaaaacggagacgaacgagaagcaatcaaatggaaggcaaagcaaccgagaaatagagagacacggagacgcagaaatgtgcgcagaggacagcgaaacgcagatgaagcggggggagacagagcggtcttcaacagcgcgcagtcgagttgaagaagagacgaacgaagaacggacgtcaaaacacacaaggggagcgaaccttggaggactgataacagaagacgaaaagtcgaattggaagataggaagtcgcaggagagatgacacaacctgtcgaggttccaaagcggtagcgtgtgcccaagagcaaaagcattcgccggatgtccttacaacgtgcttgctggcgcgacgacaccatcaggttacctcgaaagtaaataccgtttctgcatttttatcgaagaggtcttctgtctctgcttctggcctacgtaggataaaacgcttgctctgtgaaagcccctgccggtccacatgttcgtaccgcacacgcttacagtggtgtcttgcatgcatttttcgctggccatttttcttcctttcccttcgcgacggtctgtacggacgcccgagaccccgttggtccacaggcgtccggcgcggtggtgtctctggtactccggcctcatcgaacgtatgttttctcgcagtttgtctggcacgtgtttgaaaggctgtggattcgcaagtcgcgttttctgcgttcgttctcgctcttctctgcaggtcggctacccagtcctcgtgcgtccttcctacgttttgagtggtgctgccatgcgagtggtgaccgacgacgagcagctcgacgccttcctcaaaatcgcagctgtcgtcagtggcgaatctcccgtggtcatctccaagttcgtcgagaacgccaaggaagtaagaaaacgacctagacaggctcacgacttccacgcttccacgcatatccctgtatcgtgttcgtatctactttcctgtgggctacatgtctccgtgttcctatgcagtgatgtcagagatcttcctcgaaatactctcttcagctgcgtataggtgtatacttgcatgatatccatttatcttttgcttgcgtatctatgtagatggaaatgcatccgaatgggatatatatatatatatatatatgcgtgtgttttcttataattatgtatgtatatatatatatataatattgatgtgtgcaaacatgtgatctccgcttagatggggaactcttgagcaatagtgaggcaaacgaaaagaagttgtcaaaatcagcaggaaccaccgggatgaacctggtgcatgcttgcgtaagcataggcgtgcaagcatagtttcacatggtaggcaggagccggcattgttcggatgtatcgttctctcttcgttccttccgtggaaactgcctttttggcttgcaggtggaatttgacagcgtcgcttgccggggggaaatcgtaaactttgcaataagcgagcatgtggagaacgcgggtactcactctggagacgcgactttgattctccctggacagaagctttacgtggaaacgattcggtgaggacgcatgaagagtgtgttgtgacacccgtccccagtgcgcgacagagaaaaagagacgaactttccaggaacgcagagagtcttcaaagattccgttcatgagtcgcggcgggtgcatctcgcgcccattgttttcaaggacgctacgcgcccgaacgagtcgtgttctgtctcagcgtctccagttgctgaatgccgtggtgtcatcccagcaaacgcaactgtcgctcttgtcaagagcacgagaaagagaacatgctaaaagggcgtttgaagggagtggaggcggcacctgcatgtaatcgagagaaagaataatggcttagttgacgaaggacggtggagagaaagtgatcgaacttgaggcgcagtgagggcgcagagacagcgacaaagacatgtgaggatatccaggcaagtgtgatgggagagtcaggtagatatttgccagtggacaatattgctagaaatggagacaagatggatgcagggtgaacggacagttatcggtcggggtatacgagaaataaatgcatgttgaatgacttggatagatgagagagagagggacctagtggttccttggccttgcgccgccttgacgtgaagggtcgacaccagtcagatggagattctgtcgcccacatcttctttagaagaattgaaaaagctgttcttgtaagttgtgaaggcacaaatgttttttgcgtgcagtcgcgtgaagaagatctcgcagaaactcgcgcgcgcactccaagtctcaggttcgtttttctcatacactatctttcgttgattgctcttcccctgcttctcctcaaaaacctttctttgcgtcgtgcgttcgatccggtgtcttctgcctttctgtcaggtgccaactgtacacggttcgagtttctgtcttctgagtcgagtgttcttcttcaccattttttcgtcggacttcgtatcgctctgtgttatccgacagtcgatagacctcttttctccatcacgagaaagcgacggcgttgcctttcctatcgcagctcacccagtggaggcaaaccgcattggcggatctgcaattccaaaccagagttcagaggcgcctgagactgccggacgttccctcgagttcgtgtcagctgcatgcgttgcatgcgcctgcacagtaccagggacggggcacctgcgggtccgcttgcgagagggcgtgctgtgcttttctgcctttcttcaggtccgttcaacatccagttcatctgcaaacagaacgacgtgaaagtcattgagtgcaacttgcgagcgtcgcgtactttccccttcatcagcaaggccttcaatgtaaacctcatcgacctcgcgacaaagtaagaagaccaagggtattccacacgcgcctcaagttcccttttcaacacactcttcgacacacatctccgaataaacataatctgcgtgcatgtttctctagagaccgagagatctacacacgcgcatatgtatatatatatatatatatgtttgtgctcgtagggtcgatgtggcgggagcatgtcgcagatgtttttcagtttacgatacttttgcatttttgtctcgtcctctgtagcgctccccggcatgcagatgcatgtgcatgcctgtatctgtcagtacgtggtgcatgtgcgtttctacggattttttcctcatggtgtgtctctgcaccccagcatatatagagagagacatgtatatacatatgtatgtatatatatatatatgtatatatatacatacatacatacgtatgtgtgcgtatgattccactagaggcaaagctaccggtagggaccgattttgaggtggatttgtttcgttctttctcttcgtttccttgtcgtttcgtctccagggtgatgattggcgcaccggtcactccgttgccgattcacttgatggacctttccttcgtctgcgtgaaagttccagttttctctttcgcgcgtcttcgcggctgcgacccggtccttggcgtggaaatgcggtcgactggagaagtaagcaggctgctgaagaaggagaagctattccgttttcaagtcaggaagcctggcgtcgtttgaggcagatctgcattgccgtctactcggcttggaacgatagacagaggaagacacaagtgcgaggaaggggaaagggaggaaaacagcgaaagaggaggaaagaagagtacggcacaatgtgcgagcgaagcgagaagtgagtgagagtgtttagaagaacaaagtgagaaacgaaaatgaaacttctgggtatccttccctcaagcgactgttcgtggacaaacgcagttttcactcgagacgtcaacgcgttccgtctccattgcttgtctcctcgcgaccgtgttgtttttcctttcacaggttgcgtgcttcggagccagcaaacatgaggctttcctcaaggctctcatctcggctggtgtgccgctgcctcttgagaagcgaacgattctcatcagcgcaggtacgcaacgttctgtaaactaagcgattctttctgttcgctttctctctgtcgagcgacagcaactttttcctgtctccttccctccctctcgagacagagcagcttccatgttccccttagtgctttttaacagccgcgtttctctgaagtcggcgcatgcatctactattgcagatttcgcttcgtgttcgtgcgagccgaagaaatgctgcccgtcgccctggcccttcgactctctctcctcgtcagtttcgctctctccatttccagctggcgaagagtttctgtggacatatatctgtcgctcgcgcgtgatgcatgcactgcctctcggttgtgacattttatcctcttgtctttgcaggccctctgtggtcgaagatggaactcgagccgtacttcaaaatccttttggacctgggcttcacaatctacgcaacggaaggtaagtggaggcgcactccatgaatccctttgcagttctctcttctttttcttctcacactaacagttggtgttcctatctatctacctacctctctatctatgtctctctggttgtctgtctgcctctcggtccgtgtatctgtgtatctgtcggtgtagctctctaagccgcgaacggtcgtgcgtatatatatgttcatctgcaacacaacgaacgctctgtatgcacgtgccatgtcgatatgactgtgtacgctggccgtcgttgtctgtgtgcaggtgtattgcttcgccgctgcagaacgtagcatatgtgtatttattcaacattttgaagggatattgccttcggtttctttcagtggcatttagctaggattttttccttttttttgaaaggtagtgaagaacgtgtgttgacggccagggccgcagcacatgctgcgatgtctttcttttgcccatggtgtgtgtgtgtgtcttgtgtggtcgctttggcttttcttcattggactgtttttctttttgtgtttcttccatttttccgttcttcaagtgcatgcgaaggctgttaagcgtattctctcggaattggctttcacaaagctcttctgccccgctcctcgtttgtttccacttttcggcttctttttgttcaacgttcgcatgctcacacgcatgcacgcctcgattttttcctgtcctgacgcagacaagtgctcttcgttttactgctgtccccgtttccgctgccccgccgtgacttctctcgctttgcgagctcacgtttcttatttcttcgtttttctgaattttcttcggtgcccaggtacctacagattcctcatgaacagcgtcgttcgcgggcaggggacccacctgcctgggaacgcgtcgccggcgtccgacagcggccttcggactcctacgacagccgagtccgacgcagatgcgtgcatttgcgctaaatacgcatcgcgcattattcgcgtgagaaagccgattgtcggatcgaatgagtcgcacaacggaggtcaccagtcacctcacgctctctccctcattgaaagtggtaaggcccggcagtgagtgttcgggtggctgtgcagacggggcatgcgattttttgcgtttctgagcaacgaggcgccagcatgtacacacagcccagtggtttatgtcttgtttgctttcatgttgcagtcgcacatgcatgcactcttatgtgtatgcgcatctatcgtgccaaggtgtattcacatgcctagttatgtgcatgcggaggttgagatgcatactgaggatggtcgatgtttaaacgattgttcacaggctcagctattgggagcgagcatggtttttctctgtgagagttcactggaccctagacggtaaacactttcagagactggctggaccccctcgatcgaaaccatgcatgcagcagtcaagtggaccacagacagaaacagacacacagcagtgccacggagatgtaggtgcggcgttcacggaggtagaggtgaacatgtggtttcacatggcgttttgaatcttttcgcaagaaggaaagtacgcgtacttcctgctatgcacgaatcgctcatcctttcttgccgaagaacgaaacggtgtcttgtttgttcacatagggaaggtcgaaatggtcatcaatgtgcctgacagcatgaaccaccgagcggccacaaacggctacctgatgcgtcgcactgcgaccgactgcggaggtgcgtcttgcctcagtgggcgcaacagacgaaccaaagaaacgaaagaaaagacagaaaaaaatggtggaactcgtgctctagcaaaacggactacccgacggaactgcagagcgtctgtctggtccgagggcgtcttgccgttcccgactgggcgttcgaaaaaagcaagtcttctccatttcatgttttggcggcccgcgcgagcaacagtaatcttcactggcttggcccaccgactctcaagacctcagttctgtatgcgggcgcggggaaccaagtgcgaaatactcgttttctacataattatatatatatatatatatatgtatatacgcgtacatagatataaatacggacatgtagacagatgtatgcatacgcatatttagttacaaacgtgtatagatttagacagattcgtaatattttgtgtatgtttcgatcaatacattaacgtttcgcttgcaatcagatgcgtcgatggcctcaacagtcgacagagcatggggtacgctgttttctggggtcgggaacgtttcagaaatctcgtcacagagagcgggcttctccgcgccattggcttttgcgagactgtctgcagtatgttgatcggcgtttacgtcgttttcttgtttttctcttcgcagttcccctcctgacaaacgtcaaagtggcaagcatgttcgtcgaggccctcaacaagaaagaagcgaaagaagctcagggtcgctccttctgggacattcgcagctgggatgaatactggcctcaaaaataatttccaatgctttcgccaaaaacgttccatatctctcgctctactgacgcatttgagttacgcgacggatttccagcagtggctccgctgtatgcttcttcctctctctctaggcataatgatatatatatatatatatatatatatatatgcatatgtatgtgtacgtgtgtgggaacaccggcttgagaaccggttttcaagacgttgaaagtcgtctcatctttgttcctccacaactgagcatttgtctgtgtagatgcgcggctttgttcacatgtgtatcgacatctcagctgttacgtgtgctgatgtgaatagagcagcgagcgtacaagtagtgaatttgcctcagggtcttttggcgacggttggtgttgtcgaagcaacgcgcttgcagttgtgtgcatgcttgagccgatttgaaccaacaacctatttgtgcggtgccagtgttctgcaaagagagcgtcacgtcgggaatgcttcaaagccgaaacaaatggcatcgaaactctcgtcggatgcgagacatgcctgcacctcctgccgtcgcattccatttcgaaggaaagtcatcgcctcggacgccgagttctgattcacggaaaatatgcagactgtggcgtaaccattctctcagaagaaacacagatttctacaactcgaacttcgccttcttccataaacgtttcgtcaacatatttatacatacatagagatatacgtgtataagtaaa

SEQ ID NO: 4618 - protein, 490 aa, Homo sapiens
MTASSGWEPAPAATMASRIGLRMQLMREQAQQEEQRERMQQQAVMHYMQQQQQQQQQQLGGPPTPAINTPVHFQSPPPVPGEVLKVQSYLENPTSYHLQQSQHQKVREYLSETYGNKFAAHISPAQGSPKPPPAASPGVRAGHVLSSSAGNSAPNSPMAMLHIGSNPERELDDVIDNIMRLDDVLGYINPEMQMPNTLPLSSSHLNVYSSDPQVTASLVGVTSSSCPADLTQKRELTDAESRALAKERQKKDNHNLIERRRRFNINDRIKELGMLIPKANDLDVRWNKGTILKASVDYIRRMQKDLQKSRELENHSRRLEMTNKQLWLRIQELEMQARVHGLPTTSPSGMNMAELAQQVVKQELPSEEGPGEALMLGAEVPDPEPLPALPPQAPLPLPTQPPSPFHHLDFSHSLSFGGREDEGPPGYPEPLAPGHGSPFPSLSKKDLDLMLLDDSLLPLASDPLLSTMSPEASKASSRRSSFSMEEGDVL

SEQ ID NO: 4619 - DNA, 2280 bp, Homo sapiens
  source 1..2280: mol_type = genomic DNA
gaggagaaagtagagaatgatgcctccgcaccctgtgaacttccaacaagggaaggtgacatgaaaggagctcagacaatttctgtccagcaacatgacagcaagctcaggctgggagccagcgccggcagccaccatggcgtcacgcatagggttgcgcatgcagctcatgcgggagcaggcgcagcaggaggagcagcgggagcgcatgcagcaacaggctgtcatgcattacatgcagcagcagcagcagcagcaacagcagcagctcggagggccgcccaccccggccatcaatacccccgtccacttccagtcgccaccacctgtgcctggggaggtgttgaaggtgcagtcctacctggagaatcccacatcctaccatctgcagcagtcgcagcatcagaaggtgcgggagtacctgtccgagacctatgggaacaagtttgctgcccacatcagcccagcccagggctctccgaaacccccaccagccgcctccccaggggtgcgagctggacacgtgctgtcctcctccgctggcaacagtgctcccaatagccccatggccatgctgcacattggctccaaccctgagagggagttggatgatgtcattgacaacattatgcgtctggacgatgtccttggctacatcaatcctgaaatgcagatgcccaacacgctacccctgtccagcagccacctgaatgtgtacagcagcgacccccaggtcacagcctccctggtgggcgtcaccagcagctcctgccctgcggacctgacccagaagcgagagctcacagatgctgagagcagggccctggccaaggagcggcagaagaaagacaatcacaacttaattgaaaggagacgaaggttcaacatcaatgaccgcatcaaggagttgggaatgctgatccccaaggccaatgacctggacgtgcgctggaacaagggcaccatcctcaaggcctctgtggattacatccggaggatgcagaaggacctgcaaaagtccagggagctggagaaccactctcgccgcctggagatgaccaacaagcagctctggctccgtatccaggagctggagatgcaggctcgagtgcacggcctccctaccacctccccgtccggcatgaacatggctgagctggcccagcaggtggtgaagcaggagctgcctagcgaagagggcccaggggaggccctgatgctgggggctgaggtccctgaccctgagccactgccagctctgcccccgcaagccccgctgcccctgcccacccagccaccatccccattccatcacctggacttcagccacagcctgagctttgggggcagggaggacgagggtcccccgggctaccccgaacccctggcgccggggcatggctccccattccccagcctgtccaagaaggatctggacctcatgctcctggacgactcactgctaccgctggcctctgatccacttctgtccaccatgtcccccgaggcctccaaggccagcagccgccggagcagcttcagcatggaggagggcgatgtgctgtgaccctggctgcccctgtgccagggaacaggggccggcctgggggctgggagggccaggggcacctccctcccacccttcaggctgcactgtgtgtgaagtagccacctgccctgcctccctcctccccgttggcccctgtttggacttagtgcctgtctggcagcctgtggggtcaggagaagcacccccagggcagccctcttgactggcgcagtgggaagaggccttcagcccctctcccggagatggaatcgcggggcagggaggggcagggtgttctagaggtgagaagagggcctggtggagattccctgtcttctgagcccgagcccctcattaccagtgaaggacatgcttgaggggttcgggaagctcctcatctgaggcaactggtcctgggggtgctcaggcctgcctttttgggactcagatggcaggaggtccaccccgcagcctggtcctcggctctcccacaggtgggcaccccccactttggtgctaatagctctccaccaggtggtgtgagcgcgggggctgccagaagcgggaggggtcactgccggaagagcagctgccctccgacccctcactttgtgcctttagtaaacactgtgctttgtaaaaaaaaaaaaaaaaaaaaaaaaaaaaaaaaaaaaaaaaaaaaaaaaaaaaaaaaaaaaaaaaaaaaaaaaaaaaaaaaaaaaaaaaaaaaa

SEQ ID NO: 4620 - protein, 476 aa, Homo sapiens; identical to SEQ ID NO: 4610

SEQ ID NO: 4621 - DNA, 4618 bp, Homo sapiens
  source 1..4618: mol_type = genomic DNA
cggccgcggcgccgacggcggcgggaagggcggacggggcgggcctccctggtggcacggggccggagcaggccgggagcaggtggcgggcacagcttgcgggccaggcacccgaacttgcgacaagttgccggagccgcggggcgcgggcggcggacagattgaccttcagagcgagggagccagcgccggcagccaccatggcgtcacgcatagggttgcgcatgcagctcatgcgggagcaggcgcagcaggaggagcagcgggagcgcatgcagcaacaggctgtcatgcattacatgcagcagcagcagcagcagcaacagcagcagctcggagggccgcccaccccggccatcaatacccccgtccacttccagtcgccaccacctgtgcctggggaggtgttgaaggtgcagtcctacctggagaatcccacatcctaccatctgcagcagtcgcagcatcagaaggtgcgggagtacctgtccgagacctatgggaacaagtttgctgcccacatcagcccagcccagggctctccgaaacccccaccagccgcctccccaggggtgcgagctggacacgtgctgtcctcctccgctggcaacagtgctcccaatagccccatggccatgctgcacattggctccaaccctgagagggagttggatgatgtcattgacaacattatgcgtctggacgatgtccttggctacatcaatcctgaaatgcagatgcccaacacgctacccctgtccagcagccacctgaatgtgtacagcagcgacccccaggtcacagcctccctggtgggcgtcaccagcagctcctgccctgcggacctgacccagaagcgagagctcacagatgctgagagcagggccctggccaaggagcggcagaagaaagacaatcacaacttaattgaaaggagacgaaggttcaacatcaatgaccgcatcaaggagttgggaatgctgatccccaaggccaatgacctggacgtgcgctggaacaagggcaccatcctcaaggcctctgtggattacatccggaggatgcagaaggacctgcaaaagtccagggagctggagaaccactctcgccgcctggagatgaccaacaagcagctctggctccgtatccaggagctggagatgcaggctcgagtgcacggcctccctaccacctccccgtccggcatgaacatggctgagctggcccagcaggtggtgaagcaggagctgcctagcgaagagggcccaggggaggccctgatgctgggggctgaggtccctgaccctgagccactgccagctctgcccccgcaagccccgctgcccctgcccacccagccaccatccccattccatcacctggacttcagccacagcctgagctttgggggcagggaggacgagggtcccccgggctaccccgaacccctggcgccggggcatggctccccattccccagcctgtccaagaaggatctggacctcatgctcctggacgactcactgctaccgctggcctctgatccacttctgtccaccatgtcccccgaggcctccaaggccagcagccgccggagcagcttcagcatggaggagggcgatgtgctgtgaccctggctgcccctgtgccagggaacaggggccggcctgggggctgggagggccaggggcacctccctcccacccttcaggctgcactgtgtgtgaagtagccacctgccctgcctccctcctccccgttggcccctgtttggacttagtgcctgtctggcagcctgtggggtcaggagaagcacccccagggcagccctcttgactggcgcagtgggaagaggccttcagcccctctcccggagatggaatcgcggggcagggaggggcagggtgttctagaggtgagaagagggcctggtggagattccctgtcttctgagcccgagcccctcattaccagtgaaggacatgcttgaggggttcgggaagctcctcatctgaggcaactggtcctgggggtgctcaggcctgcctttttgggactcagatggcaggaggtccaccccgcagcctggtcctcggctctcccacaggtgggcaccccccactttggtgctaatagctctccaccaggtggtgtgagcgcgggggctgccagaagcgggaggggtcactgccggaagagcagctgccctccgacccctcactttgtgcctttagtaaacactgtgctttgtaaaaaaaaaaaaaaaaaaaaaaaaaaaaaaaaaaaaaaaaaaaaaaaaaaaaaaaaaaaaaaaaaaaaaaaaaaaaaaaaaaaaaaaaaaaaaggccgggagcaggtggcgggcacagcttgcgggccaggcacccgaacttgcgacaagttgccggagccgcggggcgcgggcggcggacagattgaccttcagagcgagggagccagcgccggcagccaccatggcgtcacgcatagggttgcgcatgcagctcatgcgggagcaggcgcagcaggaggagcagcgggagcgcatgcagcaacaggctgtcatgcattacatgcagcagcagcagcagcagcaacagcagcagctcggagggccgcccaccccggccatcaatacccccgtccacttccagtcgccaccacctgtgcctggggaggtgttgaaggtgcagtcctacctggagaatcccacatcctaccatctgcagcagtcgcagcatcagaaggtgcgggagtacctgtccgagacctatgggaacaagtttgctgcccacatcagcccagcccagggctctccgaaacccccaccagccgcctccccaggggtgcgagctggacacgtgctgtcctcctccgctggcaacagtgctcccaatagccccatggccatgctgcacattggctccaaccctgagagggagttggatgatgtcattgacaacattatgcgtctggacgatgtccttggctacatcaatcctgaaatgcagatgcccaacacgctacccctgtccagcagccacctgaatgtgtacagcagcgacccccaggtcacagcctccctggtgggcgtcaccagcagctcctgccctgcggacctgacccagaagcgagagctcacagatgctgagagcagggccctggccaaggagcggcagaagaaagacaatcacaacttaattgaaaggagacgaaggttcaacatcaatgaccgcatcaaggagttgggaatgctgatccccaaggccaatgacctggacgtgcgctggaacaagggcaccatcctcaaggcctctgtggattacatccggaggatgcagaaggacctgcaaaagtccagggagctggagaaccactctcgccgcctggagatgaccaacaagcagctctggctccgtatccaggagctggagatgcaggctcgagtgcacggcctccctaccacctccccgtccggcatgaacatggctgagctggcccagcaggtggtgaagcaggagctgcctagcgaagagggcccaggggaggccctgatgctgggggctgaggtccctgaccctgagccactgccagctctgcccccgcaagccccgctgcccctgcccacccagccaccatccccattccatcacctggacttcagccacagcctgagctttgggggcagggaggacgagggtcccccgggctaccccgaacccctggcgccggggcatggctccccattccccagcctgtccaagaaggatctggacctcatgctcctggacgactcactgctaccgctggcctctgatccacttctgtccaccatgtcccccgaggcctccaaggccagcagccgccggagcagcttcagcatggaggagggcgatgtgctgtgaccctggctgcccctgtgccagggaacaggggccggcctgggggctgggagggccaggggcacctccctcccacccttcaggctgcactgtgtgtgaagtagccacctgccctgcctccctcctccccgttggcccctgtttggacttagtgcctgtctggcagcctgtggggtcaggagaagcacccccagggcagccctcttgactggcgcagtgggaagaggccttcagcccctctcccggagatggaatcgcggggcagggaggggcagggtgttctagaggtgagaagagggcctggtggagattccctgtcttctgagcccgagcccctcattaccagtgaaggacatgcttgaggggttcgggaagctcctcatctgaggcaactggtcctgggggtgctcaggcctgcctttttgggactcagatggcaggaggtccaccccgcagcctggtcctcggctctcccacaggtgggcaccccccactttggtgctaatagctctccaccaggtggtgtgagcgcgggggctgccagaagcgggaggggtcactgccggaagagcagctgccctccgacccctcactttgtgcctttagtaaacactgtgctttgtaaaaaaaaaaaaaaaaaaaaaaaaaaaaaaaaaaaaaaaaaaaaaaaaaaaaaaaaaaaaaaaaaaaaaaaaaaaaaaaaaaaaaaaaaaaaa

SEQ ID NO: 4622 - protein, 476 aa, Homo sapiens; identical to SEQ ID NO: 4610

SEQ ID NO: 4623 - DNA, 2364 bp, Homo sapiens
  source 1..2364: mol_type = genomic DNA
ggccgggcgggcatgggccttcccggcccggagctgggagtcgaaggggcgggaggcgtgatggtgaactcgcaagaagtttgagggacgcgcgggccccgcgcccactccccctccaccggacacggctggggccggcgatgcctgagagggggtcggaggacgcagtgaacatatatgcatgtacagtgtggatcctcatctgagaggagggagatgaaaacacacccacctcacaggctgttgtgaggactaagggtgcggcagtgcctggtacatgggagccagcgccggcagccaccatggcgtcacgcatagggttgcgcatgcagctcatgcgggagcaggcgcagcaggaggagcagcgggagcgcatgcagcaacaggctgtcatgcattacatgcagcagcagcagcagcagcaacagcagcagctcggagggccgcccaccccggccatcaatacccccgtccacttccagtcgccaccacctgtgcctggggaggtgttgaaggtgcagtcctacctggagaatcccacatcctaccatctgcagcagtcgcagcatcagaaggtgcgggagtacctgtccgagacctatgggaacaagtttgctgcccacatcagcccagcccagggctctccgaaacccccaccagccgcctccccaggggtgcgagctggacacgtgctgtcctcctccgctggcaacagtgctcccaatagccccatggccatgctgcacattggctccaaccctgagagggagttggatgatgtcattgacaacattatgcgtctggacgatgtccttggctacatcaatcctgaaatgcagatgcccaacacgctacccctgtccagcagccacctgaatgtgtacagcagcgacccccaggtcacagcctccctggtgggcgtcaccagcagctcctgccctgcggacctgacccagaagcgagagctcacagatgctgagagcagggccctggccaaggagcggcagaagaaagacaatcacaacttaattgaaaggagacgaaggttcaacatcaatgaccgcatcaaggagttgggaatgctgatccccaaggccaatgacctggacgtgcgctggaacaagggcaccatcctcaaggcctctgtggattacatccggaggatgcagaaggacctgcaaaagtccagggagctggagaaccactctcgccgcctggagatgaccaacaagcagctctggctccgtatccaggagctggagatgcaggctcgagtgcacggcctccctaccacctccccgtccggcatgaacatggctgagctggcccagcaggtggtgaagcaggagctgcctagcgaagagggcccaggggaggccctgatgctgggggctgaggtccctgaccctgagccactgccagctctgcccccgcaagccccgctgcccctgcccacccagccaccatccccattccatcacctggacttcagccacagcctgagctttgggggcagggaggacgagggtcccccgggctaccccgaacccctggcgccggggcatggctccccattccccagcctgtccaagaaggatctggacctcatgctcctggacgactcactgctaccgctggcctctgatccacttctgtccaccatgtcccccgaggcctccaaggccagcagccgccggagcagcttcagcatggaggagggcgatgtgctgtgaccctggctgcccctgtgccagggaacaggggccggcctgggggctgggagggccaggggcacctccctcccacccttcaggctgcactgtgtgtgaagtagccacctgccctgcctccctcctccccgttggcccctgtttggacttagtgcctgtctggcagcctgtggggtcaggagaagcacccccagggcagccctcttgactggcgcagtgggaagaggccttcagcccctctcccggagatggaatcgcggggcagggaggggcagggtgttctagaggtgagaagagggcctggtggagattccctgtcttctgagcccgagcccctcattaccagtgaaggacatgcttgaggggttcgggaagctcctcatctgaggcaactggtcctgggggtgctcaggcctgcctttttgggactcagatggcaggaggtccaccccgcagcctggtcctcggctctcccacaggtgggcaccccccactttggtgctaatagctctccaccaggtggtgtgagcgcgggggctgccagaagcgggaggggtcactgccggaagagcagctgccctccgacccctcactttgtgcctttagtaaacactgtgctttgtaaaaaaaaaaa

SEQ ID NO: 4624 - protein, 391 aa, Homo sapiens
MASRIGLRMQLMREQAQQEEQRERMQQQAVMHYMQQQQQQQQQQLGGPPTPAINTPVHFQSPPPVPGEVLKLDDVIDNIMRLDDVLGYINPEMQMPNTLPLSSSHLNVYSSDPQVTASLVGVTSSSCPADLTQKRELTDAESRALAKERQKKDNHNLIERRRRFNINDRIKELGMLIPKANDLDVRWNKGTILKASVDYIRRMQKDLQKSRELENHSRRLEMTNKQLWLRIQELEMQARVHGLPTTSPSGMNMAELAQQVVKQELPSEEGPGEALMLGAEVPDPEPLPALPPQAPLPLPTQPPSPFHHLDFSHSLSFGGREDEGPPGYPEPLAPGHGSPFPSLSKKDLDLMLLDDSLLPLASDPLLSTMSPEASKASSRRSSFSMEEGDVL

SEQ ID NO: 4625 - DNA, 2089 bp, Homo sapiens
  source 1..2089: mol_type = genomic DNA
cggccgcggcgccgacggcggcgggaagggcggacggggcgggcctccctggtggcacggggccggagcaggccgggagcaggtggcgggcacagcttgcgggccaggcacccgaacttgcgacaagttgccggagccgcggggcgcgggcggcggacagattgaccttcagagcgagggagccagcgccggcagccaccatggcgtcacgcatagggttgcgcatgcagctcatgcgggagcaggcgcagcaggaggagcagcgggagcgcatgcagcaacaggctgtcatgcattacatgcagcagcagcagcagcagcaacagcagcagctcggagggccgcccaccccggccatcaatacccccgtccacttccagtcgccaccacctgtgcctggggaggtgttgaagttggatgatgtcattgacaacattatgcgtctggacgatgtccttggctacatcaatcctgaaatgcagatgcccaacacgctacccctgtccagcagccacctgaatgtgtacagcagcgacccccaggtcacagcctccctggtgggcgtcaccagcagctcctgccctgcggacctgacccagaagcgagagctcacagatgctgagagcagggccctggccaaggagcggcagaagaaagacaatcacaacttaattgaaaggagacgaaggttcaacatcaatgaccgcatcaaggagttgggaatgctgatccccaaggccaatgacctggacgtgcgctggaacaagggcaccatcctcaaggcctctgtggattacatccggaggatgcagaaggacctgcaaaagtccagggagctggagaaccactctcgccgcctggagatgaccaacaagcagctctggctccgtatccaggagctggagatgcaggctcgagtgcacggcctccctaccacctccccgtccggcatgaacatggctgagctggcccagcaggtggtgaagcaggagctgcctagcgaagagggcccaggggaggccctgatgctgggggctgaggtccctgaccctgagccactgccagctctgcccccgcaagccccgctgcccctgcccacccagccaccatccccattccatcacctggacttcagccacagcctgagctttgggggcagggaggacgagggtcccccgggctaccccgaacccctggcgccggggcatggctccccattccccagcctgtccaagaaggatctggacctcatgctcctggacgactcactgctaccgctggcctctgatccacttctgtccaccatgtcccccgaggcctccaaggccagcagccgccggagcagcttcagcatggaggagggcgatgtgctgtgaccctggctgcccctgtgccagggaacaggggccggcctgggggctgggagggccaggggcacctccctcccacccttcaggctgcactgtgtgtgaagtagccacctgccctgcctccctcctccccgttggcccctgtttggacttagtgcctgtctggcagcctgtggggtcaggagaagcacccccagggcagccctcttgactggcgcagtgggaagaggccttcagcccctctcccggagatggaatcgcggggcagggaggggcagggtgttctagaggtgagaagagggcctggtggagattccctgtcttctgagcccgagcccctcattaccagtgaaggacatgcttgaggggttcgggaagctcctcatctgaggcaactggtcctgggggtgctcaggcctgcctttttgggactcagatggcaggaggtccaccccgcagcctggtcctcggctctcccacaggtgggcaccccccactttggtgctaatagctctccaccaggtggtgtgagcgcgggggctgccagaagcgggaggggtcactgccggaagagcagctgccctccgacccctcactttgtgcctttagtaaacactgtgctttgtaaaaaaaaaaaaaaaaaaaaaaaaaaaaaaaaaaaaaaaaaaaaaaaaaaaaaaaaaaaaaaaaaaaaaaaaaaaaaaaaaaaaaaaaaaaaa
